(19) United States
(12) Patent Application Publication
(10) Pub. No.: US 2025/0352639 A1
(43) Pub. Date: Nov. 20, 2025

(54) Bicistronic LAMP Constructs Comprising Immune Response Enhancing Genes and Methods of Use Thereof

(71) Applicant: Immunomic Therapeutics, Inc., Rockville, MD (US)

(72) Inventors: Teri Heiland, New Market, MD (US); Wei Shen, North Potomac, MD (US); Yun-Ting Kao, Germantown, MD (US); Renhuan Xu, North Potomac, MD (US)

(73) Assignee: Immunomic Therapeutics, Inc., Rockville, MD (US)

(21) Appl. No.: 18/854,261

(22) PCT Filed: Apr. 10, 2023
(86) PCT No.: PCT/US2023/065588

§ 371 Date: Oct. 4, 2024

Related U.S. Application Data
(60) Provisional application No. 63/329,463, filed on Apr. 10, 2022.

(51) Int. Cl. A61K 39/215; A61K 9/00; A61K 31/7105; A61K 31/711; A61K 39/00; A61P 31/14; C07K 14/705; C12N 15/62

(52) U.S. Cl. CPC A61K 39/215; A61K 9/0019; A61K 31/7105; A61K 31/711; A61P 31/14; C07K 14/70596; C12N 15/62; A61K 2039/53; A61K 2039/54

(57) ABSTRACT

The present disclosure provides nucleic acid molecules (e.g., a plasmid or vector) comprising a nucleic acid sequence encoding a bicistronic or multicistronic LAMP Construct comprising specific fragments of the LAMP luminal domain and an antigenic domain heterologous to the LAMP protein to provide at least one antigen for priming an immune response, wherein the antigen expressed by the Construct is optionally processed and presented to MHC class II molecules, and also a nucleic acid sequence encoding an immune response enhancing polypeptide that is optionally secreted from a host cell. The nucleic acid molecules can be used, for example, for the treatment of disease and in particular, allergies, infectious disease, diabetes, hyperproliferative disorders and/or cancer.

### CROSS-REFERENCE TO RELATED APPLICATIONS

[0001] This application is a national stage entry pursuant to 35 U.S.C. § 371 of International Application No. PCT/US2023/065588, filed Apr. 10, 2023, which claims priority to U.S. Provisional Patent Application No. 63/329,463, filed Apr. 10, 2022, each of which are incorporated by reference in their entirety herein.

### SEQUENCE LISTING

[0002] The present application contains a Sequence Listing which has been submitted electronically in XML format. Said XML copy, created on Apr. 22, 2025, is named “2025-04-22_01305-0023-00PCTST26.xml” and is 1,419,384 bytes in size. The information in the electronic format of the sequence listing is incorporated herein by reference in its entirety.

### FIELD

[0003] The disclosure relates to isolated nucleic acid molecules (e.g., a plasmid or vector) encoding a bicistronic or multicistronic LAMP (Lysosomal-Associated Membrane Protein) Construct comprising a LAMP fusion protein and a second, optionally secreted protein such as from an immune response enhancing gene (IREG), and their use in treating subjects suffering from infectious disease, diabetes, allergies, hyperproliferative disorders and/or cancer, and in particular COVID-19. Additionally, the bicistronic LAMP construct described herein can be used to generate antibodies in non-human vertebrates, preferably where the genome of the non-human vertebrates comprises at least partially human immunoglobulin regions and/or humanized immunoglobulin regions.

### BACKGROUND

[0004] In the following discussion, certain articles and methods will be described for background and introductory purposes. Nothing contained herein is to be construed as an “admission” of prior art. Applicant expressly reserves the right to demonstrate, where appropriate, that the articles and methods referenced herein do not constitute prior art under the applicable statutory provisions.

[0005] Vaccines are new and promising candidates for the development of both prophylactic and therapeutic vaccines. They are proven to be safe and the lack of immune responses to a vector backbone may be a definitive advantage if repetitive cycles of vaccination are required to achieve clinical benefits. However, one perceived disadvantage of conventional vaccines is their low immunogenicity in humans. A key limiting step in the immunogenicity of epitope-based vaccines may be the access of epitopes to the major histocompatibility (MHC) class II presentation pathway to T cells, which is likely a stochastic process in the case of a vaccine without targeting technology.

[0006] LAMP-antigen constructs of various designs have previously been described, for example, in U.S. Pat. No. 11,203,629 (see FIG. 1 therein). One type of construct, described in U.S. Pat. No. 11,203,629 named ILC-4 (depicted in FIG. 1 herein), comprises at least one antigen of interest fused in between a first homology domain of a LAMP protein and a second homology domain of a LAMP protein (or at least between two Cysteine Conserved Fragments), for example the at least one antigen of interest may be placed in the LAMP hinge region. In some embodiments, this construct also comprises a transmembrane domain of a LAMP protein, and/or the cytosolic tail of a LAMP protein. The two homology domains may be derived from, for example, LAMP-1, LAMP-2, LAMP-3, or an Endolyn protein. Alternatively, two homology domains from two different LAMP proteins may be used. The inventors unexpectedly found that improved LAMP Constructs such as ILC-4 can, for example, elicit strong T-cell and antibody responses against the antigen(s) of interest, making them viable candidates for use as vaccines.

[0007] Notwithstanding the above, there is a further needed to design new and further improved LAMP constructs, and the nucleic acid molecules encoding them, that can be used as vaccines to effectively treat, for example, allergies, infectious disease, diabetes, hyperproliferative disorders and/or cancer, and/or be used in the generation of useful antibodies.

### SUMMARY

[0008] As described further herein, the inventors have now found that isolated nucleic acid molecules can be designed that not only express a LAMP construct, such as that described, for example, in FIG. 1 herein, but that also express a particular type of second polypeptide, often a secreted polypeptide, encoding a gene such as CD40L, CD80, OX40, IL-12, IL-21, IL-15, or Flt3L or the like that have been found to enhance immune responses against tumors or infectious diseases in vivo, and that expressing these two polypeptides from the isolated nucleic acid molecule unexpectedly enhances the immune response compared to not only earlier LAMP constructs but also compared to bicistronic LAMP constructs comprising certain secreted antigens such as a second disease antigen.

[0009] This Summary is provided to introduce a selection of concepts in a simplified form that are further described below in the Detailed Description. This Summary is not intended to identify key or essential features of the claimed subject matter, nor is it intended to be used to limit the scope of the claimed subject matter. Other features, details, utilities, and advantages of the claimed subject matter will be apparent from the following written Detailed Description including those aspects illustrated in the accompanying drawings and defined in the appended claims.

[0010] One object of this disclosure to provide novel nucleic acid molecules encoding constructs (“bicistronic LAMP constructs”) comprising specific fragments and/or variants of LAMP domains that effectively present an antigen(s) of interest to the immune system to generate an enhanced immune response. These bicistronic LAMP constructs effectively direct the antigens to the lysosomal/endosomal compartment where they are processed and presented to major histocompatibility complex (MHC) class II molecules so that helper T cells are preferentially stimulated and/or antibodies are generated along with the ability to enhance the immune response.

[0011] The nucleic acid molecules encoding the bicistronic LAMP constructs and methods described herein may elicit an immune response in a subject. The immune response may be an immune response to an epitope of an antigen encoded in the bicistronic LAMP construct (e.g., vaccine). Vaccines arm the immune system of the subject such that the immune system may detect and destroy that which contains the antigen(s) of a vaccine in the subject. The nucleic acid molecules encoding the bicistronic LAMP constructs and methods described herein may elicit a Th1 immune response in the subject. Th1 immune responses may include secretion of inflammatory cytokines (e.g., IFNγ, TNFa) by a subset of immune cells (e.g., antigen specific T-cells). In some cases, the inflammatory cytokines activate another subtype of immune cells (e.g., cytotoxic T-cells) which may destroy that which contains the antigen in the subject.

[0012] In some cases, an antigen used in the bicistronic LAMP constructs and methods described herein may be recognized by the immune system of a subject to elicit a Th1 immune response and release Type I cytokines. The Th1 response may be initiated by the interaction between the epitope and the T-cell, more specifically, the major histocompatibility complex (MHC) expressed by the T-cell. For example, high affinity binding of an epitope to an MHC receptor may stimulate a Th1 response. MHC receptors may be at least one of a plurality of types of MHC receptors. The MHC receptors engaged on a T-cell may vary across individuals in a population.

[0013] In some cases, the immune response is a Type 1 immune response. In some cases, the immune response is characterized by a ratio of Type I cytokine production to Type II cytokine production that is greater than 1. In some cases, the immune response is characterized by a ratio of Type I cytokine production to Type II cytokine production that is less than 1. In some cases, the immune response is characterized by a ratio of IFNγ production to IL-10 production that is greater than 1. In some cases, the immune response is characterized by a ratio of IFNγ production to IL-10 production that is less than 1.

[0014] The nucleic acid molecules encoding the bicistronic LAMP constructs described herein can also be used in a manner to provide an expression of immunoregulatory elements (IREs) or immune response enhancing-genes (IREGs) elicit an enhanced immune response in a subject (e.g., an immune response comprising a significantly higher antibody titer). For example, a nucleic acid molecule (e.g., a plasmid or vector) may provide for the expression of a bicistronic LAMP construct comprising a LAMP-antigen polypeptide that is processed and presented to MHC class II molecules so that helper T cells are preferentially stimulated, memory cells are initiated and/or antibodies are generated), as well as providing for the expression of a further IREG or IRE polypeptide that may be secreted into the circulation of the subject, and that may, for example, enhance further both the humoral and cellular immune response to the LAMP antigen.

[0015] In one aspect, the nucleic acid molecule encoding the bicistronic LAMP construct is a vaccine vector, suitable for vaccinating a subject. In another aspect, the disclosure provides a delivery vehicle for facilitating the introduction of the nucleic acid molecule encoding the bicistronic LAMP construct comprising polynucleotides encoding epitopes and/or antigens into a cell. The delivery vehicle may be lipid-based (e.g., a liposome formulation), viral-based (e.g., comprising viral proteins encapsulating the nucleic acid molecule), or cell-based.

[0016] In some embodiments, the disclosure provides an injectable composition comprising a nucleic acid molecule as described herein encoding a bicistronic LAMP construct for eliciting an immune response (e.g., generation of antibodies) in a subject to an antigen. In some embodiments, this vaccine generates a preferential Th1 response to a Th2 response.

[0017] The disclosure also provides a cell comprising a nucleic acid molecule as described herein encoding a bicistronic LAMP construct which can be used to generate an immune response. In one aspect, the cell is an antigen presenting cell. The antigen presenting cell may be a professional antigen presenting cell (e.g., a dendritic cell, macrophage, B cell, and the like) or an engineered antigen presenting cell (e.g., a non-professional antigen presenting cell engineered to express molecules required for antigen presentation, such as MHC class II molecules). The molecules required for antigen presentation may be derived from other cells, e.g., naturally occurring, or may themselves be engineered (e.g., mutated or modified to express desired properties, such as higher or lower affinity for an antigenic epitope).

[0018] The disclosure additionally provides a kit comprising a plurality of cells comprising a nucleic acid molecule as described herein encoding a bicistronic LAMP construct. At least two of the cells may express different MHC class II molecules, and each cell may comprise the same LAMP Construct. In one aspect, a kit is provided comprising a viral vector encoding a bicistronic LAMP construct.

[0019] The disclosure also provides a transgenic animal comprising at least one of the cells and/or at least one of the nucleic acid molecules encoding a bicistronic LAMP construct as described herein. The disclosure also provides a transgenic animal comprising at least one of the cells described herein.

[0020] The disclosure further provides a method for generating an enhanced immune response in a subject (e.g., a human or a non-human vertebrate) to an antigen, comprising administering to the subject a cell as described above, wherein the cell expresses, or can be induced to express, the bicistronic LAMP construct in the subject. In one aspect, the cell comprises an MHC class II molecule compatible with MHC proteins of the subject, such that the subject does not generate an immune response against the MHC class II molecule.

[0021] In one further aspect, the disclosure provides a method for eliciting an enhanced immune response to an antigen, comprising administering to a subject, such as a human or a non-human vertebrate, a nucleic acid molecule encoding a bicistronic LAMP construct as described herein. Preferably, the nucleic acid molecule is infectious for a cell of the subject. For example, the nucleic acid molecule encoding the bicistronic LAMP construct may be a viral vector, such as a vaccinia vector.

[0022] The present disclosure also comprises methods of generating antibodies in a non-human vertebrate wherein the non-human vertebrate is injected with a nucleic acid molecule encoding a bicistronic LAMP construct as described herein. Generated antibodies can be isolated from the blood of the vertebrate (as polyclonals) and then further isolated to generate monoclonal antibodies using standard techniques.

[0023] The methods described herein can be used in the production and/or optimization of antibodies, including fully human antibodies, humanized antibodies, chimeric antibodies, for diagnostic and therapeutic uses. Hybridomas producing such antibodies are also a further object of the disclosure.

[0024] Specific embodiments of the disclosure include the following:

[0025] 1. An isolated nucleic acid molecule comprising
[0026] a. a first polynucleotide sequence encoding a polypeptide comprising two homology domains of a luminal domain of a LAMP protein, and an antigenic domain heterologous to the LAMP protein (collectively a “LAMP-antigen Construct”), wherein the antigenic domain is placed between the two homology domains; and
[0027] b. a second polypeptide sequence encoding at least one second polypeptide comprising an immune response enhancing gene polypeptide (IREG) or an extracellular domain of an IREG comprising a secretion signal sequence.

[0028] 2. The isolated nucleic acid molecule of embodiment 1, wherein the LAMP protein is selected from LAMP-1, LAMP2, LAMP-3, lysosomal integral membrane protein-2 (“LIMP 2”), Macrosailin, Endolyn, LAMP5 or limbic system-associated membrane protein (“LIMBIC”).

[0029] 3. The isolated nucleic acid molecule of embodiment 2, wherein the LAMP protein is selected from any one of SEQ ID NO:1-113.

[0030] 4. The isolated nucleic acid molecule of embodiment 1 or 2, wherein the LAMP protein is at least 70%, at least 75%, at least 80%, at least 85%, at least 90%, at least 95%, at least 96%, at least 97%, at least 98%, or at least 99% identical to SEQ ID NO:1-113.

[0031] 5. The isolated nucleic acid molecule of embodiment 2, wherein the LAMP protein is LAMP-1 and wherein the two homology domains of the LAMP-antigen Construct comprise LAMP-1 Homology Domain 1 and LAMP-1 Homology Domain 2.

[0032] 6. The isolated nucleic acid molecule of embodiment 5, wherein the human LAMP-1 Homology Domain 1 comprises the amino acid sequence of residues 29-194 of SEQ ID NO: 1, or comprises the amino acid sequence of residues 29-195 of SEQ ID NO: 198, or comprises an amino acid sequence at least 90%, at least 95%, at least 96%, at least 97%, at least 98%, or at least 99% identical to the amino acid sequence of residues 29-194 of SEQ ID NO: 1 or to the amino acid sequence of residues 29-195 of SEQ ID NO: 198, or wherein the nucleic acid molecule comprises the nucleotide sequence of SEQ ID NO: 199 or a nucleotide sequence at least 90%, at least 95%, at least 96%, at least 97%, at least 98%, or at least 99% identical to that of SEQ ID NO: 199 (wherein if the nucleotide sequence is RNA, T is replaced with U).

[0033] 7. The isolated nucleic acid molecule of embodiment 5 or 6, wherein the human LAMP-1 Homology Domain 2 comprises the amino acid sequence of residues 228-381 of SEQ ID NO: 1, or of residues 228-382 of SEQ ID NO: 1, or comprises the amino acid sequence of SEQ ID NO: 202, or comprises an amino acid sequence at least 90%, at least 95%, at least 96%, at least 97%, at least 98%, or at least 99% identical to the amino acid sequence of residues 228-381 of SEQ ID NO: 1 or to the amino acid sequence of SEQ ID NO: 202, or wherein the nucleic acid molecule comprises the nucleotide sequence of SEQ ID NO: 203 or a nucleotide sequence at least 90%, at least 95%, at least 96%, at least 97%, at least 98%, or at least 99% identical to that of SEQ ID NO: 203 (wherein if the nucleotide sequence is RNA, T is replaced with U).

[0034] 8. The isolated nucleic acid molecule of any one of embodiments 1-7, wherein the LAMP-antigen construct comprises a linker between at least one of the two homology domains and the antigenic domain.

[0035] 9. The isolated nucleic acid molecule of embodiment 8, wherein the linker comprises an amino acid sequence of GPGPG or PMGLP.

[0036] 10. The isolated nucleic acid molecule of any one of embodiments 1-9, wherein the LAMP-antigen construct further comprises a transmembrane domain of a LAMP Protein.

[0037] 11. The isolated nucleic acid molecule of embodiment 10, wherein the transmembrane domain comprises residues 383 to 405 of SEQ ID NO: 1.

[0038] 12. The isolated nucleic acid molecule of any one of embodiments 1-11, wherein the LAMP-antigen construct further comprises a signal sequence.

[0039] 13. The isolated nucleic acid molecule of embodiment 12, wherein the signal sequence is derived from a LAMP Protein

[0040] 14. The isolated nucleic acid molecule of any one of embodiments 1-13, wherein the LAMP-antigen construct further comprises cytoplasmic domain of a LAMP Protein.

[0041] 15. The isolated nucleic acid molecule of embodiment 14, wherein the cytoplasmic domain comprises residues 406-417 of SEQ ID NO: 1.

[0042] 16. The isolated nucleic acid molecule of any one of embodiments 1-15, wherein the IREG comprises one or more of CD40L, CD80, OX40, Flt3L, GM-CSF, IL-12, IL-21, IL-23, IL-15, CD70, CD86, IL-7, IL-18, or IL-33 (or comprises an amino acid sequence at least 90%, at least 95%, at least 96%, at least 97%, at least 98%, or at least 99% identical, or 100% identical to the amino acid sequence of any one of SEQ ID NOs: 133, 145, 147, 149, 151, 155, 159, 165, 169, 173, 177, 181, 189, 191, 204, 238, 242, 243, 252, or 253), or an extracellular domain thereof, optionally wherein the CD40L, CD80, OX40, Flt3L, GM-CSF, IL-12, IL-21, IL-23, or IL-15 is fused to an Fc domain of an immunoglobulin, or wherein the isolated nucleic acid molecule comprises a nucleotide sequence encoding CD40L, CD80, OX40, Flt3L, GM-CSF, IL-12, IL-21, IL-23, IL-15, CD70, CD86, IL-7, IL-18, or IL-33, optionally fused to an Fc domain, wherein the nucleotide sequence at least 90%, at least 95%, at least 96%, at least 97%, at least 98%, or at least 99% identical, or 100% identical to that of any one of SEQ ID NOs: 134, 146, 148, 150, 152, 160, 166, 170, 174, 178, 182, 190, 192, 205, 239, 244, or 881.

[0043] 17. The isolated nucleic acid molecule of any one of embodiments 1-16, wherein the secretion signal sequence is heterologous to the IREG.

[0044] 18. The isolated nucleic acid molecule of embodiment 17, wherein the secretion signal sequence is derived from IgKVIII (e.g., SEQ ID NO: 122), Ig-kappa (e.g., SEQ ID NO: 120), tetranectin, or IL-2, and/or wherein the second polypeptide further comprises pulmonary surfactant associated protein D (SPD) (e.g., SEQ ID NO: 131).

[0045] 19. The isolated nucleic acid molecule of embodiment 18, wherein the second polypeptide is expressed under the control of an EF-1alpha core promoter, such as that of SEQ ID NO: 124.

[0046] 20. A composition comprising the isolated nucleic acid molecule any one of embodiments 1-18.

[0047] 21. A host cell comprising the isolated nucleic acid of any one of embodiments 1-18.

[0048] 22. A composition comprising the host cell of embodiment 20.

[0049] 23. A method of treating a subject having a disease or a disorder or of inducing an immune response in a subject with a disease or disorder or at risk of developing a disease or disorder, wherein the method comprises administering to the subject the isolated nucleic acid molecule of any one of embodiments 1-18, the composition of embodiment 19, or the host cell of embodiment 20, in an amount sufficient to treat the disease or disorder or to induce an immune response in the subject.

[0050] 24. The method of embodiment 23, wherein the method further comprises administering at least one second therapeutic to the subject.

[0051] 25. An isolated nucleic acid molecule comprising
[0052] a. a first polynucleotide sequence encoding a polypeptide comprising two homology domains of a luminal domain of a LAMP protein, and an antigenic domain comprising HER2 extracellular domain (collectively “HER2-LAMP”), wherein the antigenic domain is placed between the two LAMP homology domains; and
[0053] b. a second polypeptide sequence encoding at least one second polypeptide comprising an immune response enhancing gene polypeptide (IREG) or an extracellular domain of an IREG comprising a secretion signal sequence.

[0054] 26. The isolated nucleic acid molecule of embodiment 25, wherein the LAMP protein is selected from LAMP-1, LAMP2, LAMP-3, lysosomal integral membrane protein-2 (“LIMP 2”), Macrosailin, Endolyn, LAMP5 or limbic system-associated membrane protein (“LIMBIC”).

[0055] 27. The isolated nucleic acid molecule of embodiment 26, wherein the LAMP protein is selected from any one of SEQ ID NO:1-113.

[0056] 28. The isolated nucleic acid molecule of embodiment 25 or 26, wherein the LAMP protein is at least 70%, at least 75%, at least 80%, at least 85%, at least 90%, at least 95%, at least 96%, at least 97%, at least 98%, or at least 99% identical to SEQ ID NO:1-113.

[0057] 29. The isolated nucleic acid molecule of embodiment 26, wherein the LAMP protein is LAMP-1 and wherein the two homology domains of the HER2-LAMP comprise LAMP-1 Homology Domain 1 and LAMP-1 Homology Domain 2.

[0058] 30. The isolated nucleic acid molecule of embodiment 29, wherein the human LAMP-1 Homology Domain 1 comprises the amino acid sequence of residues 29-194 of SEQ ID NO: 1, or comprises the amino acid sequence of residues 29-195 of SEQ ID NO: 198, or comprises an amino acid sequence at least 90%, at least 95%, at least 96%, at least 97%, at least 98%, or at least 99% identical to the amino acid sequence of residues 29-194 of SEQ ID NO: 1 or to the amino acid sequence of residues 29-195 of SEQ ID NO: 198, or wherein the nucleic acid molecule comprises the nucleotide sequence of SEQ ID NO: 199 or a nucleotide sequence at least 90%, at least 95%, at least 96%, at least 97%, at least 98%, or at least 99% identical to that of SEQ ID NO: 199 (wherein if the nucleotide sequence is RNA, T is replaced with U).

[0059] 31. The isolated nucleic acid molecule of embodiment 29 or 30, wherein the human LAMP-1 Homology Domain 2 comprises the amino acid sequence of residues 228-381 or 228-382 of SEQ ID NO: 1, or of residues 228-382 of SEQ ID NO: 1, or comprises the amino acid sequence of SEQ ID NO: 202, or comprises an amino acid sequence at least 90%, at least 95%, at least 96%, at least 97%, at least 98%, or at least 99% identical to the amino acid sequence of residues 228-381 of SEQ ID NO: 1 or to the amino acid sequence of SEQ ID NO: 202, or wherein the nucleic acid molecule comprises the nucleotide sequence of SEQ ID NO: 203 or a nucleotide sequence at least 90%, at least 95%, at least 96%, at least 97%, at least 98%, or at least 99% identical to that of SEQ ID NO: 203 (wherein if the nucleotide sequence is RNA, T is replaced with U).

[0060] 32. The isolated nucleic acid molecule of any one of embodiments 25-31, wherein the HER2-LAMP comprises a linker between at least one of the two homology domains and the antigenic domain.

[0061] 33. The isolated nucleic acid molecule of embodiment 32, wherein the linker comprises an amino acid sequence of GPGPG or PMGLP.

[0062] 34. The isolated nucleic acid molecule of any one of embodiments 25-33, wherein the HER2-LAMP further comprises a transmembrane domain of a LAMP Protein.

[0063] 35. The isolated nucleic acid molecule of embodiment 34, wherein the transmembrane domain comprises residues 383 to 405 of SEQ ID NO: 1.

[0064] 36. The isolated nucleic acid molecule of any one of embodiments 25-35, wherein the HER2-LAMP further comprises a signal sequence.

[0065] 37. The isolated nucleic acid molecule of embodiment 36, wherein the signal sequence is derived from a LAMP Protein.

[0066] 38. The isolated nucleic acid molecule of any one of embodiments 25-37, wherein the HER2-LAMP further comprises cytoplasmic domain of a LAMP Protein.

[0067] 39. The isolated nucleic acid molecule of embodiment 38, wherein the cytoplasmic domain comprises residues 406-417 of SEQ ID NO: 1.

[0068] 40. The isolated nucleic acid molecule of any one of embodiments 25-39, wherein the antigenic domain comprises or consists of the amino acid sequence of SEQ ID NO: 200.

[0069] 41. The isolated nucleic acid molecule of any one of embodiments 25-40, wherein the HER2-LAMP comprises or consists of the amino acid sequence of residues 1-194 of SEQ ID NO: 1 or of SEQ ID NO: 198 followed by the amino acid sequence of SEQ ID NO: 200 followed by the amino acid sequence of residues 228-381 of SEQ ID NO: 1 or of SEQ ID NO: 202.

[0070] 42. The isolated nucleic acid molecule of any one of embodiments 25-41, wherein the IREG comprises one or more of CD40L, CD80, OX40, Flt3L, GM-CSF, IL-12, IL-21, IL-23, IL-15, CD70, CD86, IL-7, IL-18, or IL-33 (or comprises an amino acid sequence at least 90%, at least 95%, at least 96%, at least 97%, at least 98%, or at least 99% identical, or 100% identical to the amino acid sequence of any one of SEQ ID NOs: 133, 145, 147, 149, 151, 155, 159, 165, 169, 173, 177, 181, 189, 191, 193, 204, 238, 242, 243, 252, or 253), or an extracellular domain thereof, optionally wherein the CD40L, CD80, OX40, Flt3L, GM-CSF, IL-12, IL-21, IL-23, or IL-15 is fused to an Fc domain of an immunoglobulin, or wherein the isolated nucleic acid molecule comprises a nucleotide sequence encoding CD40L, CD80, OX40, Flt3L, GM-CSF, IL-12, IL-21, IL-23, IL-15, CD70, CD86, IL-7, IL-18, or IL-33, optionally fused to an Fc domain, wherein the nucleotide sequence at least 90%, at least 95%, at least 96%, at least 97%, at least 98%, or at least 99% identical, or 100% identical to that of any one of SEQ ID NOs: 134, 146, 148, 150, 152, 160, 166, 170, 174, 178, 182, 190, 192, 194, 205, 239, 244, or 881.

[0071] 43. The isolated nucleic acid molecule of any one of embodiments 25-42, wherein the secretion signal sequence is heterologous to the IREG.

[0072] 44. The isolated nucleic acid molecule of embodiment 43, wherein the secretion signal sequence is derived from IgKVIII (e.g., SEQ ID NO: 122), Ig-kappa (e.g., SEQ ID NO: 120), tetranectin, or IL-2.

[0073] 45. The isolated nucleic acid molecule of any one of embodiments 25-44, wherein the second polypeptide comprises a fusion of SPD and soluble CD40L (sCD40L), a fusion of SPD and Flt3L, IL-12, IL-21, OX40L fused to an Fc domain, CD80 fused to an Fc domain, or IL-15 (such as comprising an amino acid sequence at least 90%, at least 95%, at least 96%, at least 97%, at least 98%, or at least 99% identical to, or 100% identical to SEQ ID NO: 233, 238, 242, or 252, or comprising an amino acid sequence at least 90%, at least 95%, at least 96%, at least 97%, at least 98%, or at least 99% identical to, or 100% identical to: the amino acid sequence of SEQ ID NO: 131 followed by the amino acid sequence of one of SEQ ID NOs: 204, 151, 145, 147, 149, 193, 181, 155, 159, 169, 252, or 253), or wherein the nucleic acid comprises a nucleotide sequence encoding a fusion of SPD and soluble CD40L (sCD40L), a fusion of SPD and Flt3L, IL-12, IL-21, OX40L fused to an Fc domain, CD80 fused to an Fc domain, or IL-15 (such as comprising a nucleotide sequence at least 90%, at least 95%, at least 96%, at least 97%, at least 98%, or at least 99% identical to, or 100% identical to the sequence of: SEQ ID NO: 132 followed by one of SEQ ID NOs: 205, 152, 146, 148, 150, 194, 182, 156, 170 or 881).

[0074] 46. The isolated nucleic acid molecule of embodiment 45, wherein the second polypeptide is expressed under the control of an EF-1alpha core promoter, such as that of SEQ ID NO: 124.

[0075] 47. A composition comprising the isolated nucleic acid molecule of any one of embodiments 25-46.

[0076] 48. A host cell comprising the isolated nucleic acid of any one of embodiments 25-46.

[0077] 49. A composition comprising the host cell of embodiment 48.

[0078] 50. A method of treating a subject having cancer, wherein the method comprises administering to the subject the isolated nucleic acid molecule of any one of embodiments 25-46, the composition of embodiment 47, or the host cell of embodiment 48, in an amount sufficient to treat the cancer or to induce an immune response in the subject against the cancer.

[0079] 51. The method of embodiment 50, wherein the method further comprises administering at least one second therapeutic to the subject.

[0080] 52. An isolated nucleic acid molecule comprising
[0081] a. a first polynucleotide sequence encoding a polypeptide comprising two homology domains of a luminal domain of a LAMP protein, and an antigenic domain comprising a coronavirus Spike protein antigen (collectively “Spike-LAMP”), wherein the antigenic domain is placed between the two LAMP homology domains; and
[0082] b. a second polypeptide sequence encoding at least one second polypeptide comprising an immune response enhancing gene polypeptide (IREG) or an extracellular domain of an IREG comprising a secretion signal sequence.

[0083] 53. The isolated nucleic acid molecule of embodiment 52, wherein the LAMP protein is selected from LAMP-1, LAMP2, LAMP-3, lysosomal integral membrane protein-2 (“LIMP 2”), Macrosailin, Endolyn, LAMP5 or limbic system-associated membrane protein (“LIMBIC”).

[0084] 54. The isolated nucleic acid molecule of embodiment 53, wherein the LAMP protein is selected from any one of SEQ ID NO:1-113.

[0085] 55. The isolated nucleic acid molecule of embodiment 52 or 53, wherein the LAMP protein is at least 70%, at least 75%, at least 80%, at least 85%, at least 90%, at least 95%, at least 96%, at least 97%, at least 98%, or at least 99% identical to SEQ ID NO:1-113.

[0086] 56. The isolated nucleic acid molecule of embodiment 53, wherein the LAMP protein is LAMP-1 and wherein the two homology domains of the Spike-LAMP comprise LAMP-1 Homology Domain 1 and LAMP-1 Homology Domain 2.

[0087] 57. The isolated nucleic acid molecule of embodiment 56, wherein the human LAMP-1 Homology Domain 1 comprises the amino acid sequence of residues 29-194 of SEQ ID NO: 1, or comprises the amino acid sequence of residues 29-195 of SEQ ID NO: 198, or comprises an amino acid sequence at least 90%, at least 95%, at least 96%, at least 97%, at least 98%, or at least 99% identical to the amino acid sequence of residues 29-194 of SEQ ID NO: 1 or to the amino acid sequence of residues 29-195 of SEQ ID NO: 198, or wherein the nucleic acid molecule comprises the nucleotide sequence of SEQ ID NO: 199 or a nucleotide sequence at least 90%, at least 95%, at least 96%, at least 97%, at least 98%, or at least 99% identical to that of SEQ ID NO: 199 (wherein if the nucleotide sequence is RNA, T is replaced with U).

[0088] 58. The isolated nucleic acid molecule of embodiment 56 or 57, wherein the human LAMP-1 Homology Domain 2 comprises the amino acid sequence of residues 228-381 or 228-382 of SEQ ID NO: 1, or of residues 228-382 of SEQ ID NO: 1, or comprises the amino acid sequence of SEQ ID NO: 202, or comprises an amino acid sequence at least 90%, at least 95%, at least 96%, at least 97%, at least 98%, or at least 99% identical to the amino acid sequence of residues 228-381 of SEQ ID NO: 1 or to the amino acid sequence of SEQ ID NO: 202, or wherein the nucleic acid molecule comprises the nucleotide sequence of SEQ ID NO: 203 or a nucleotide sequence at least 90%, at least 95%, at least 96%, at least 97%, at least 98%, or at least 99% identical to that of SEQ ID NO: 203 (wherein if the nucleotide sequence is RNA, T is replaced with U).

[0089] 59. The isolated nucleic acid molecule of any one of embodiments 52-58, wherein the Spike-LAMP comprises a linker between at least one of the two homology domains and the antigenic domain.

[0090] 60. The isolated nucleic acid molecule of embodiment 59, wherein the linker comprises an amino acid sequence of GPGPG or PMGLP.

[0091] 61. The isolated nucleic acid molecule of any one of embodiments 52-60, wherein the Spike-LAMP further comprises a transmembrane domain of a LAMP Protein.

[0092] 62. The isolated nucleic acid molecule of embodiment 61, wherein the transmembrane domain comprises residues 383 to 405 of SEQ ID NO: 1.

[0093] 63. The isolated nucleic acid molecule of any one of embodiments 52-62, wherein the Spike-LAMP further comprises a signal sequence.

[0094] 64. The isolated nucleic acid molecule of embodiment 63, wherein the signal sequence is derived from a LAMP Protein 65. The isolated nucleic acid molecule of any one of embodiments 52-64, wherein the Spike-LAMP further comprises cytoplasmic domain of a LAMP Protein.

[0095] 66. The isolated nucleic acid molecule of embodiment 65, wherein the cytoplasmic domain comprises residues 406-417 of SEQ ID NO: 1.

[0096] 67. The isolated nucleic acid molecule of any one of embodiments 52-66, wherein the antigenic domain comprises Spike S1 and/or S2, or an amino acid sequence comprising the sequence of SEQ ID NO: 118 or 119.

[0097] 68. The isolated nucleic acid molecule of any one of embodiments 52-67, wherein the Spike-LAMP comprises or consists of the amino acid sequence of residues 1-194 of SEQ ID NO: 1 or of SEQ ID NO: 198 followed by the amino acid sequence of SEQ ID NO: 231 followed by the amino acid sequence of residues 228-381 of SEQ ID NO: 1 or of SEQ ID NO: 202.

[0098] 69. The isolated nucleic acid molecule of any one of embodiments 52-68, wherein the IREG comprises one or more of CD40L, CD80, OX40, Flt3L, GM-CSF, IL-12, IL-21, IL-23, IL-15, CD70, CD86, IL-7, IL-18, or IL-33 (or comprises an amino acid sequence at least 90%, at least 95%, at least 96%, at least 97%, at least 98%, or at least 99% identical, or 100% identical to the amino acid sequence of any one of SEQ ID NOs: 133, 145, 147, 149, 151, 155, 159, 165, 169, 173, 177, 181, 189, 191, 204, 238, 242, 243, 252, or 253), or an extracellular domain thereof, optionally wherein the CD40L, CD80, OX40, Flt3L, GM-CSF, IL-12, IL-21, IL-23, or IL-15 is fused to an Fc domain of an immunoglobulin, or wherein the isolated nucleic acid molecule comprises a nucleotide sequence encoding CD40L, CD80, OX40, Flt3L, GM-CSF, IL-12, IL-21, IL-23, IL-15, CD70, CD86, IL-7, IL-18, or IL-33, optionally fused to an Fc domain, wherein the nucleotide sequence at least 90%, at least 95%, at least 96%, at least 97%, at least 98%, or at least 99% identical, or 100% identical to that of any one of SEQ ID NOs: 134, 146, 148, 150, 152, 160, 166, 170, 174, 178, 182, 190, 192, 205, 239, 244, or 881.

[0099] 70. The isolated nucleic acid molecule of any one of embodiments 52-68, wherein the second polypeptide comprises an SPD-sCD40L fusion polypeptide.

[0100] 71. The isolated nucleic acid molecule of any one of embodiments 52-70, wherein the secretion signal sequence is heterologous to the IREG.

[0101] 72. The isolated nucleic acid molecule of embodiment 71, wherein the secretion signal sequence is derived from SPD.

[0102] 73. The isolated nucleic acid molecule of any one of embodiments 52-72, wherein the second polypeptide is expressed under the control of an EF-1alpha core promoter, such as that of SEQ ID NO: 124.

[0103] 74. A composition comprising the isolated nucleic acid molecule of any one of embodiments 52-73.

[0104] 75. A host cell comprising the isolated nucleic acid of any one of embodiments 52-73.

[0105] 76. A composition comprising the host cell of embodiment 75.

[0106] 77. A method of treating a subject having or at risk of developing a coronavirus infection such as from COVID-19, wherein the method comprises administering to the subject the isolated nucleic acid molecule of any one of embodiments 52-73, the composition of embodiment 74, or the host cell of embodiment 75, in an amount sufficient to treat or prevent onset of or reduce the severity of symptoms of the coronavirus infection such as COVID-19.

[0107] 78. A method of inducing an immune response against a coronavirus such as SARS Co-V2 in a subject, wherein the method comprises administering to the subject the isolated nucleic acid molecule of any one of embodiments 52-73, the composition of embodiment 74, or the host cell of embodiment 75, in an amount sufficient to induce an immune response against the coronavirus such as SARS Co-V2 in the subject.

[0108] 79. An isolated nucleic acid molecule comprising
[0109] a. a first polynucleotide sequence encoding a polypeptide comprising two homology domains of a luminal domain of a LAMP protein, and an antigenic domain comprising a NY-ESO1 or CD161 protein antigen (a “NY-ESO1-LAMP” or “CD161-LAMP” LAMP-antigen Construct), wherein the antigenic domain is placed between the two LAMP homology domains; and
[0110] b. a second polypeptide sequence encoding at least one second polypeptide comprising an immune response enhancing gene polypeptide (IREG) or an extracellular domain of an IREG comprising a secretion signal sequence.

[0111] 80. The isolated nucleic acid molecule of embodiment 79, wherein the LAMP protein is selected from LAMP-1, LAMP2, LAMP-3, lysosomal integral membrane protein-2 (“LIMP 2”), Macrosailin, Endolyn, LAMP5 or limbic system-associated membrane protein (“LIMBIC”).

[0112] 81. The isolated nucleic acid molecule of embodiment 80, wherein the LAMP protein is selected from any one of SEQ ID NO:1-113.

[0113] 82. The isolated nucleic acid molecule of embodiment 79 or 80, wherein the LAMP protein is at least 70%, at least 75%, at least 80%, at least 85%, at least 90%, at least 95%, at least 96%, at least 97%, at least 98%, or at least 99% identical to SEQ ID NO:1-113.

[0114] 83. The isolated nucleic acid molecule of embodiment 79, wherein the LAMP protein is LAMP-1 and wherein the two homology domains of the NY-ESO1-LAMP or CD161-LAMP comprise LAMP-1 Homology Domain 1 and LAMP-1 Homology Domain 2.

[0115] 84. The isolated nucleic acid molecule of embodiment 83, wherein the human LAMP-1 Homology Domain 1 comprises the amino acid sequence of residues 29-194 of SEQ ID NO: 1, or comprises the amino acid sequence of residues 29-195 of SEQ ID NO: 198, or comprises an amino acid sequence at least 90%, at least 95%, at least 96%, at least 97%, at least 98%, or at least 99% identical to the amino acid sequence of residues 29-194 of SEQ ID NO: 1 or to the amino acid sequence of residues 29-195 of SEQ ID NO: 198, or wherein the nucleic acid molecule comprises the nucleotide sequence of SEQ ID NO: 199 or a nucleotide sequence at least 90%, at least 95%, at least 96%, at least 97%, at least 98%, or at least 99% identical to that of SEQ ID NO: 199 (wherein if the nucleotide sequence is RNA, T is replaced with U).

[0116] 85. The isolated nucleic acid molecule of embodiment 83 or 84, wherein the human LAMP-1 Homology Domain 2 comprises the amino acid sequence of residues 228-381 or 228-382 of SEQ ID NO: 1, or of residues 228-382 of SEQ ID NO: 1, or comprises the amino acid sequence of SEQ ID NO: 202, or comprises an amino acid sequence at least 90%, at least 95%, at least 96%, at least 97%, at least 98%, or at least 99% identical to the amino acid sequence of residues 228-381 of SEQ ID NO: 1 or to the amino acid sequence of SEQ ID NO: 202, or wherein the nucleic acid molecule comprises the nucleotide sequence of SEQ ID NO: 203 or a nucleotide sequence at least 90%, at least 95%, at least 96%, at least 97%, at least 98%, or at least 99% identical to that of SEQ ID NO: 203 (wherein if the nucleotide sequence is RNA, T is replaced with U).

[0117] 86. The isolated nucleic acid molecule of any one of embodiments 79-85, wherein the LAMP-antigen Construct comprises a linker between at least one of the two homology domains and the antigenic domain.

[0118] 87. The isolated nucleic acid molecule of embodiment 86, wherein the linker comprises an amino acid sequence of GPGPG or PMGLP.

[0119] 88. The isolated nucleic acid molecule of any one of embodiments 79-87, wherein the LAMP-antigen Construct further comprises a transmembrane domain of a LAMP Protein.

[0120] 89. The isolated nucleic acid molecule of embodiment 88, wherein the transmembrane domain comprises residues 383 to 405 of SEQ ID NO: 1.

[0121] 90. The isolated nucleic acid molecule of any one of embodiments 79-89, wherein the LAMP-antigen Construct further comprises a signal sequence.

[0122] 91. The isolated nucleic acid molecule of embodiment 90, wherein the signal sequence is derived from a LAMP Protein

[0123] 92. The isolated nucleic acid molecule of any one of embodiments 79-91, wherein the LAMP-antigen Construct further comprises cytoplasmic domain of a LAMP Protein.

[0124] 93. The isolated nucleic acid molecule of embodiment 92, wherein the cytoplasmic domain comprises residues 406-417 of SEQ ID NO: 1.

[0125] 94. The isolated nucleic acid molecule of any one of embodiments 79-93, wherein the LAMP-antigen Construct comprises or consists of the amino acid sequence of residues 1-194 of SEQ ID NO: 1 or of SEQ ID NO: 198 followed by the amino acid sequence of SEQ ID NO: 223 followed by the amino acid sequence of residues 228-381 of SEQ ID NO: 1 or of SEQ ID NO: 202 or residues 1-194 of SEQ ID NO: 1 or of SEQ ID NO: 198 followed by the amino acid sequence of SEQ ID NO: 236 followed by the amino acid sequence of residues 228-381 of SEQ ID NO: 1 or of SEQ ID NO: 202.

[0126] 95. The isolated nucleic acid molecule of any one of embodiments 79-94, wherein the IREG comprises one or more of CD40L, CD80, OX40, Flt3L, GM-CSF, IL-12, IL-21, IL-23, IL-15, CD70, CD86, IL-7, IL-18, or IL-33 (or comprises an amino acid sequence at least 90%, at least 95%, at least 96%, at least 97%, at least 98%, or at least 99% identical, or 100% identical to the amino acid sequence of any one of SEQ ID NOs: 133, 145, 147, 149, 151, 155, 159, 165, 169, 173, 177, 181, 189, 191, 204, 238, 242, 243, 252, or 253), or an extracellular domain thereof, optionally wherein the CD40L, CD80, OX40, Flt3L, GM-CSF, IL-12, IL-21, IL-23, or IL-15 is fused to an Fc domain of an immunoglobulin, or wherein the isolated nucleic acid molecule comprises a nucleotide sequence encoding CD40L, CD80, OX40, Flt3L, GM-CSF, IL-12, IL-21, IL-23, IL-15, CD70, CD86, IL-7, IL-18, or IL-33, optionally fused to an Fc domain, wherein the nucleotide sequence at least 90%, at least 95%, at least 96%, at least 97%, at least 98%, or at least 99% identical, or 100% identical to that of any one of SEQ ID NOs: 134, 146, 148, 150, 152, 160, 166, 170, 174, 178, 182, 190, 192, 205, 239, 244, or 881.

[0127] 96. The isolated nucleic acid molecule of any one of embodiments 79-95, wherein the second polypeptide comprises an SPD-sCD40L fusion polypeptide or an IL-15 polypeptide (e.g., SEQ ID NO: 233 or 169 or 225).

[0128] 97. The isolated nucleic acid molecule of any one of embodiments 79-96, wherein the secretion signal sequence is heterologous to the IREG.

[0129] 98. The isolated nucleic acid molecule of embodiment 97, wherein the secretion signal sequence is derived from SPD or comprises SEQ ID NO: 120 or 122.

[0130] 99. The isolated nucleic acid molecule of any one of embodiments 79-98, wherein the second polypeptide is expressed under the control of an EF-1alpha core promoter, such as that of SEQ ID NO: 124.

[0131] 100. A composition comprising the isolated nucleic acid molecule of any one of embodiments 79-99.

[0132] 101. A host cell comprising the isolated nucleic acid of any one of embodiments 79-99.

[0133] 102. A composition comprising the host cell of embodiment 101.

[0134] 103. A method of inducing an immune response in a subject in need thereof, comprising administering to the subject an amount of the isolated nucleic acid molecule of any one of embodiments 79-99, the composition of embodiment 100, or the host cell of embodiment 101 in an amount sufficient to induce an immune response in the subject.

[0135] 104. An isolated nucleic acid molecule comprising
[0136] a. a first polynucleotide sequence encoding a polypeptide comprising two homology domains of a luminal domain of a LAMP protein, and an antigenic domain comprising a pp65 antigen such as comprising SEQ ID NO: 291, 292, or 293 and optionally further comprising one or both of a gB antigen such as comprising SEQ ID NO: 294, 295, 296, or 297 and a 1E1 antigen such as comprising SEQ ID NO: 298, 299, or 300, optionally comprising linker peptides between the pp65 and the gB and/or 1E1 antigen sequences (collectively “pp65-LAMP”), wherein the antigenic domain is placed between the two LAMP homology domains; and
[0137] b. a second polypeptide sequence encoding at least one second polypeptide comprising an immune response enhancing gene polypeptide (IREG) or an extracellular domain of an IREG comprising a secretion signal sequence.

[0138] 105. The isolated nucleic acid molecule of embodiment 104, wherein the LAMP protein is selected from LAMP-1, LAMP2, LAMP-3, lysosomal integral membrane protein-2 (“LIMP 2”), Macrosailin, Endolyn, LAMP5 or limbic system-associated membrane protein (“LIMBIC”).

[0139] 106. The isolated nucleic acid molecule of embodiment 105, wherein the LAMP protein is selected from any one of SEQ ID NO:1-113.

[0140] 107. The isolated nucleic acid molecule of embodiment 104 or 105, wherein the LAMP protein is at least 70%, at least 75%, at least 80%, at least 85%, at least 90%, at least 95%, at least 96%, at least 97%, at least 98%, or at least 99% identical to SEQ ID NO:1-113.

[0141] 108. The isolated nucleic acid molecule of embodiment 105, wherein the LAMP protein is LAMP-1 and wherein the two homology domains of the HER2-LAMP comprise LAMP-1 Homology Domain 1 and LAMP-1 Homology Domain 2.

[0142] 109. The isolated nucleic acid molecule of embodiment 108, wherein the human LAMP-1 Homology Domain 1 comprises the amino acid sequence of residues 29-194 of SEQ ID NO: 1, or comprises the amino acid sequence of residues 29-195 of SEQ ID NO: 198, or comprises an amino acid sequence at least 90%, at least 95%, at least 96%, at least 97%, at least 98%, or at least 99% identical to the amino acid sequence of residues 29-194 of SEQ ID NO: 1 or to the amino acid sequence of residues 29-195 of SEQ ID NO: 198, or wherein the nucleic acid molecule comprises the nucleotide sequence of SEQ ID NO: 199 or a nucleotide sequence at least 90%, at least 95%, at least 96%, at least 97%, at least 98%, or at least 99% identical to that of SEQ ID NO: 199 (wherein if the nucleotide sequence is RNA, T is replaced with U).

[0143] 110. The isolated nucleic acid molecule of embodiment 108 or 109, wherein the human LAMP-1 Homology Domain 2 comprises the amino acid sequence of residues 228-381 or 228-382 of SEQ ID NO: 1, or of residues 228-382 of SEQ ID NO: 1, or comprises the amino acid sequence of SEQ ID NO: 202, or comprises an amino acid sequence at least 90%, at least 95%, at least 96%, at least 97%, at least 98%, or at least 99% identical to the amino acid sequence of residues 228-381 of SEQ ID NO: 1 or to the amino acid sequence of SEQ ID NO: 202, or wherein the nucleic acid molecule comprises the nucleotide sequence of SEQ ID NO: 203 or a nucleotide sequence at least 90%, at least 95%, at least 96%, at least 97%, at least 98%, or at least 99% identical to that of SEQ ID NO: 203 (wherein if the nucleotide sequence is RNA, T is replaced with U).

[0144] 111. The isolated nucleic acid molecule of any one of embodiments 104-110, wherein the pp65-LAMP comprises a linker between at least one of the two homology domains and the antigenic domain.

[0145] 112. The isolated nucleic acid molecule of embodiment 111, wherein the linker comprises an amino acid sequence of GPGPG or PMGLP.

[0146] 113. The isolated nucleic acid molecule of any one of embodiments 104-112, wherein the pp65-LAMP further comprises a transmembrane domain of a LAMP Protein.

[0147] 114. The isolated nucleic acid molecule of embodiment 113, wherein the transmembrane domain comprises residues 383 to 405 of SEQ ID NO: 1.

[0148] 115. The isolated nucleic acid molecule of any one of embodiments 104-114, wherein the pp65-LAMP further comprises a signal sequence.

[0149] 116. The isolated nucleic acid molecule of embodiment 115, wherein the signal sequence is derived from a LAMP Protein

[0150] 117. The isolated nucleic acid molecule of any one of embodiments 104-116, wherein the pp65-LAMP further comprises cytoplasmic domain of a LAMP Protein.

[0151] 118. The isolated nucleic acid molecule of embodiment 117, wherein the cytoplasmic domain comprises residues 406-417 of SEQ ID NO: 1.

[0152] 119. The isolated nucleic acid molecule of any one of embodiments 104-118, wherein the IREG comprises one or more of CD40L, CD80, OX40, Flt3L, GM-CSF, IL-12, IL-21, IL-23, IL-15, CD70, CD86, IL-7, IL-18, or IL-33 (or comprises an amino acid sequence at least 90%, at least 95%, at least 96%, at least 97%, at least 98%, or at least 99% identical, or 100% identical to the amino acid sequence of any one of SEQ ID NOs: 133, 145, 147, 149, 151, 155, 159, 165, 169, 173, 177, 181, 189, 191, 204, 238, 242, 243, 252, or 253), or an extracellular domain thereof, optionally wherein the CD40L, CD80, OX40, Flt3L, GM-CSF, IL-12, IL-21, IL-23, or IL-15 is fused to an Fc domain of an immunoglobulin, or wherein the isolated nucleic acid molecule comprises a nucleotide sequence encoding CD40L, CD80, OX40, Flt3L, GM-CSF, IL-12, IL-21, IL-23, IL-15, CD70, CD86, IL-7, IL-18, or IL-33, optionally fused to an Fc domain, wherein the nucleotide sequence at least 90%, at least 95%, at least 96%, at least 97%, at least 98%, or at least 99% identical, or 100% identical to that of any one of SEQ ID NOs: 134, 146, 148, 150, 152, 160, 166, 170, 174, 178, 182, 190, 192, 205, 239, 244, or 881.

[0153] 120. The isolated nucleic acid molecule of any one of embodiments 104-119, wherein the secretion signal sequence is heterologous to the IREG.

[0154] 121. The isolated nucleic acid molecule of embodiment 120, wherein the secretion signal sequence is derived from IgKVIII (e.g., SEQ ID NO: 122), Ig-kappa (e.g., SEQ ID NO: 120), tetranectin, or IL-2.

[0155] 122. The isolated nucleic acid molecule of any one of embodiments 104-121, wherein the second polypeptide comprises a fusion of SPD and soluble CD40L (sCD40L), a fusion of SPD and Flt3L, IL-12, IL-21, OX40L fused to an Fc domain, CD80 fused to an Fc domain, or IL-15 (such as comprising an amino acid sequence at least 90%, at least 95%, at least 96%, at least 97%, at least 98%, or at least 99% identical to, or 100% identical to SEQ ID NO: 233, 238, 242, or 252, or comprising an amino acid sequence at least 90%, at least 95%, at least 96%, at least 97%, at least 98%, or at least 99% identical to, or 100% identical to: the amino acid sequence of SEQ ID NO: 131 followed by the amino acid sequence of one of SEQ ID NOs: 204, 151, 145, 147, 149, 193, 181, 155, 159, 169, 252, or 253), or wherein the nucleic acid comprises a nucleotide sequence encoding a fusion of SPD and soluble CD40L (sCD40L), a fusion of SPD and Flt3L, IL-12, IL-21, OX40L fused to an Fc domain, CD80 fused to an Fc domain, or IL-15 (such as comprising a nucleotide sequence at least 90%, at least 95%, at least 96%, at least 97%, at least 98%, or at least 99% identical to, or 100% identical to the sequence of: SEQ ID NO: 132 followed by one of SEQ ID NOs: 205, 152, 146, 148, 150, 194, 182, 156, 170 or 881).

[0156] 123. The isolated nucleic acid molecule of embodiment 122, wherein the second polypeptide is expressed under the control of an EF-1alpha core promoter, such as that of SEQ ID NO: 124.

[0157] 124. A composition comprising the isolated nucleic acid molecule of any one of embodiments 104-123.

[0158] 125. A host cell comprising the isolated nucleic acid of any one of embodiments 104-123.

[0159] 126. A composition comprising the host cell of embodiment 125.

[0160] 127. A method of treating a subject having cancer, wherein the method comprises administering to the subject the isolated nucleic acid molecule of any one of embodiments 104-123, the composition of embodiment 124, or the host cell of embodiment 125, in an amount sufficient to treat the cancer or to induce an immune response in the subject against the cancer.

[0161] 128. The method of embodiment 127, wherein the method further comprises administering at least one second therapeutic to the subject.

[0162] 129. The method of embodiment 127 or 128, wherein the cancer is selected from glioblastoma, breast cancer, prostate cancer, colorectal cancer, and head and neck cancer.

[0163] 130. An isolated nucleic acid molecule comprising
[0164] a. a first polynucleotide sequence encoding a polypeptide comprising two homology domains of a luminal domain of a LAMP protein, and an antigenic domain comprising a Large T antigen such as comprising the amino acid sequence of SEQ ID NO: 254, 255, or 256 (“LargeT-LAMP”), wherein the antigenic domain is placed between the two LAMP homology domains; and
[0165] b. a second polypeptide sequence encoding at least one second polypeptide comprising an immune response enhancing gene polypeptide (IREG) or an extracellular domain of an IREG comprising a secretion signal sequence.

[0166] 131. The isolated nucleic acid molecule of embodiment 130, wherein the LAMP protein is selected from LAMP-1, LAMP2, LAMP-3, lysosomal integral membrane protein-2 (“LIMP 2”), Macrosailin, Endolyn, LAMP5 or limbic system-associated membrane protein (“LIMBIC”).

[0167] 132. The isolated nucleic acid molecule of embodiment 131, wherein the LAMP protein is selected from any one of SEQ ID NO:1-113.

[0168] 133. The isolated nucleic acid molecule of embodiment 130 or 131, wherein the LAMP protein is at least 70%, at least 75%, at least 80%, at least 85%, at least 90%, at least 95%, at least 96%, at least 97%, at least 98%, or at least 99% identical to SEQ ID NO:1-113.

[0169] 134. The isolated nucleic acid molecule of embodiment 131, wherein the LAMP protein is LAMP-1 and wherein the two homology domains of the HER2-LAMP comprise LAMP-1 Homology Domain 1 and LAMP-1 Homology Domain 2.

[0170] 135. The isolated nucleic acid molecule of embodiment 134, wherein the human LAMP-1 Homology Domain 1 comprises the amino acid sequence of residues 29-194 of SEQ ID NO: 1, or comprises the amino acid sequence of residues 29-195 of SEQ ID NO: 198, or comprises an amino acid sequence at least 90%, at least 95%, at least 96%, at least 97%, at least 98%, or at least 99% identical to the amino acid sequence of residues 29-194 of SEQ ID NO: 1 or to the amino acid sequence of residues 29-195 of SEQ ID NO: 198, or wherein the nucleic acid molecule comprises the nucleotide sequence of SEQ ID NO: 199 or a nucleotide sequence at least 90%, at least 95%, at least 96%, at least 97%, at least 98%, or at least 99% identical to that of SEQ ID NO: 199 (wherein if the nucleotide sequence is RNA, T is replaced with U).

[0171] 136. The isolated nucleic acid molecule of embodiment 134 or 135, wherein the human LAMP-1 Homology Domain 2 comprises the amino acid sequence of residues 228-381 or 228-382 of SEQ ID NO: 1, or of residues 228-382 of SEQ ID NO: 1, or comprises the amino acid sequence of SEQ ID NO: 202, or comprises an amino acid sequence at least 90%, at least 95%, at least 96%, at least 97%, at least 98%, or at least 99% identical to the amino acid sequence of residues 228-381 of SEQ ID NO: 1 or to the amino acid sequence of SEQ ID NO: 202, or wherein the nucleic acid molecule comprises the nucleotide sequence of SEQ ID NO: 203 or a nucleotide sequence at least 90%, at least 95%, at least 96%, at least 97%, at least 98%, or at least 99% identical to that of SEQ ID NO: 203 (wherein if the nucleotide sequence is RNA, T is replaced with U).

[0172] 137. The isolated nucleic acid molecule of any one of embodiments 130-136, wherein the LargeT-LAMP comprises a linker between at least one of the two homology domains and the antigenic domain.

[0173] 138. The isolated nucleic acid molecule of embodiment 137, wherein the linker comprises an amino acid sequence of GPGPG or PMGLP.

[0174] 139. The isolated nucleic acid molecule of any one of embodiments 130-138, wherein the LargeT-LAMP further comprises a transmembrane domain of a LAMP Protein.

[0175] 140. The isolated nucleic acid molecule of embodiment 140, wherein the transmembrane domain comprises residues 383 to 405 of SEQ ID NO: 1.

[0176] 141. The isolated nucleic acid molecule of any one of embodiments 130-140, wherein the pp65-LAMP further comprises a signal sequence.

[0177] 142. The isolated nucleic acid molecule of embodiment 141, wherein the signal sequence is derived from a LAMP Protein

[0178] 143. The isolated nucleic acid molecule of any one of embodiments 130-142, wherein the LargeT-LAMP further comprises cytoplasmic domain of a LAMP Protein.

[0179] 144. The isolated nucleic acid molecule of embodiment 143, wherein the cytoplasmic domain comprises residues 406-417 of SEQ ID NO: 1.

[0180] 145. The isolated nucleic acid molecule of any one of embodiments 130-144, wherein the IREG comprises one or more of CD40L, CD80, OX40, Flt3L, GM-CSF, IL-12, IL-21, IL-23, IL-15, CD70, CD86, IL-7, IL-18, or IL-33 (or comprises an amino acid sequence at least 90%, at least 95%, at least 96%, at least 97%, at least 98%, or at least 99% identical, or 100% identical to the amino acid sequence of any one of SEQ ID NOs: 133, 145, 147, 149, 151, 155, 159, 165, 169, 173, 177, 181, 189, 191, 204, 238, 242, 243, 252, or 253), or an extracellular domain thereof, optionally wherein the CD40L, CD80, OX40, Flt3L, GM-CSF, IL-12, IL-21, IL-23, or IL-15 is fused to an Fc domain of an immunoglobulin, or wherein the isolated nucleic acid molecule comprises a nucleotide sequence encoding CD40L, CD80, OX40, Flt3L, GM-CSF, IL-12, IL-21, IL-23, IL-15, CD70, CD86, IL-7, IL-18, or IL-33, optionally fused to an Fc domain, wherein the nucleotide sequence at least 90%, at least 95%, at least 96%, at least 97%, at least 98%, or at least 99% identical, or 100% identical to that of any one of SEQ ID NOs: 134, 146, 148, 150, 152, 160, 166, 170, 174, 178, 182, 190, 192, 205, 239, 244, or 881.

[0181] 146. The isolated nucleic acid molecule of any one of embodiments 130-145, wherein the secretion signal sequence is heterologous to the IREG.

[0182] 147. The isolated nucleic acid molecule of embodiment 146, wherein the secretion signal sequence is derived from IgKVIII (e.g., SEQ ID NO: 122), Ig-kappa (e.g., SEQ ID NO: 120), tetranectin, or IL-2.

[0183] 148. The isolated nucleic acid molecule of any one of embodiments 130-147, wherein the second polypeptide comprises a fusion of SPD and soluble CD40L (sCD40L), a fusion of SPD and Flt3L, IL-12, IL-21, OX40L fused to an Fc domain, CD80 fused to an Fc domain, or IL-15 (such as comprising an amino acid sequence at least 90%, at least 95%, at least 96%, at least 97%, at least 98%, or at least 99% identical to, or 100% identical to SEQ ID NO: 233, 238, 242, or 252, or comprising an amino acid sequence at least 90%, at least 95%, at least 96%, at least 97%, at least 98%, or at least 99% identical to, or 100% identical to: the amino acid sequence of SEQ ID NO: 131 followed by the amino acid sequence of one of SEQ ID NOs: 204, 151, 145, 147, 149, 193, 181, 155, 159, 169, 252, or 253), or wherein the nucleic acid comprises a nucleotide sequence encoding a fusion of SPD and soluble CD40L (sCD40L), a fusion of SPD and Flt3L, IL-12, IL-21, OX40L fused to an Fc domain, CD80 fused to an Fc domain, or IL-15 (such as comprising a nucleotide sequence at least 90%, at least 95%, at least 96%, at least 97%, at least 98%, or at least 99% identical to, or 100% identical to the sequence of: SEQ ID NO: 132 followed by one of SEQ ID NOs: 205, 152, 146, 148, 150, 194, 182, 156, 170 or 881).

[0184] 149. The isolated nucleic acid molecule of embodiment 148, wherein the second polypeptide is expressed under the control of an EF-1alpha core promoter, such as that of SEQ ID NO: 124.

[0185] 150. A composition comprising the isolated nucleic acid molecule of any one of embodiments 130-149.

[0186] 151. A host cell comprising the isolated nucleic acid of any one of embodiments 130-149.

[0187] 152. A composition comprising the host cell of embodiment 151.

[0188] 153. A method of treating a subject having cancer, wherein the method comprises administering to the subject the isolated nucleic acid molecule of any one of embodiments 130-149, the composition of embodiment 150, or the host cell of embodiment 151, in an amount sufficient to treat the cancer or to induce an immune response in the subject against the cancer.

[0189] 154. The method of embodiment 153, wherein the method further comprises administering at least one second therapeutic to the subject.

[0190] 155. The method of embodiment 153 or 154, wherein the cancer is skin cancer, such as Merkel cell carcinoma.

[0191] 156. The isolated nucleic acid of any one of embodiments 1-19, 25-46, 52-73, 79-99, 104-123, or 130-149, wherein the isolated nucleic acid comprises DNA, mRNA, or self-amplifying RNA.

[0192] 157. A set of polypeptides encoded by the isolated nucleic acid of any one of embodiments 1-19, 25-46, 52-73, or 79-99, 104-123, or 130-149.

[0193] Additional objects and advantages will be set forth in part in the description which follows, and in part will be understood from the description, or may be learned by practice. The objects and advantages will be realized and attained by means of the elements and combinations particularly pointed out in the appended claims.

[0194] It is to be understood that both the foregoing general description and the following detailed description are exemplary and explanatory only and are not restrictive of the claims.

[0195] The accompanying drawings, which are incorporated in and constitute a part of this specification, illustrate one (several) embodiment(s) and together with the description, serve to explain the principles described herein.

### BRIEF DESCRIPTION OF THE DRAWINGS

[0196] The objects and features of the disclosure can be better understood with reference to the following detailed description and accompanying drawings.

[0197] FIG. 1 illustrates the general scheme of different types of improved LAMP-antigen Constructs (identified as ILC-1, ILC-2, ILC-3, ILC-4, ILC-5 and ILC-6) that can be used as described herein. Certain backbone constructs are further described in U.S. Pat. No. 11,203,629, which disclosure is incorporated by reference in its entirety.

[0198] FIG. 2B illustrates the domains of the LAMP proteins defined herein while FIG. 2A defines the specific amino acid boundaries of these domains for human LAMP-1 (SEQ ID NO: 1), human LAMP-2 (SEQ ID NO: 2), human LAMP-3 (SEQ ID NO: 3), human LIMP-2 (SEQ ID NO: 4), human Endolyn (SEQ ID NO: 5), human Macrosialin (SEQ ID NO: 80), human LAMP-5 (SEQ ID NO: 93) and human LIMBIC (SEQ ID NO: 67). As described herein the LAMP luminal domains, Homology Domains, transmembrane domains, the cytoplasmic tail and the signal sequences can be used to generate the bicistronic LAMP constructs as described herein.

[0199] FIG. 3 provides alignment of LAMP-1 proteins found in other species as compared to human LAMP-1 (SEQ ID NO: 1). The equivalent domains of these other species can be used to generate the bicistronic LAMP constructs described herein and are readily identifiable by comparing the domains identified for human LAMP-1 in FIG. 2 and FIG. 3 to the alignments shown in FIG. 3.

[0200] FIG. 4 provides alignment of LAMP-2 proteins found in other species as compared to human LAMP-2 (SEQ ID NO: 2). The equivalent domains of these other species can be used to generate the bicistronic LAMP constructs described herein and are readily identifiable by comparing the domains identified for human LAMP-2 in FIG. 2 and FIG. 4 to the alignments shown in FIG. 4.

[0201] FIG. 5 provides alignment of LAMP-3 proteins found in other species as compared to human LAMP-3 (SEQ ID NO: 3). The equivalent domains of these other species can be used to generate the bicistronic LAMP constructs described herein and are readily identifiable by comparing the domains identified for human LAMP-3 in FIG. 2 and FIG. 5 to the alignments shown in FIG. 5.

[0202] FIG. 6 provides alignment of LIMP-2 proteins found in other species as compared to human LIMP-2 (SEQ ID NO: 4). The equivalent domains of these other species can be used to generate the bicistronic LAMP constructs described herein and are readily identifiable by comparing the domains identified for human LIMP-2 in FIG. 2 and FIG. 6 to the alignments shown in FIG. 6.

[0203] FIG. 7 provides alignment of LIMBIC proteins found in other species as compared to human LIMBIC (SEQ ID NO: 67). The equivalent domains of these other species can be used to generate the bicistronic LAMP constructs described herein and are readily identifiable by comparing the domains identified for human LIMBIC in FIG. 2 and FIG. 7 to the alignments shown in FIG. 7.

[0204] FIG. 8 provides alignment of Endolyn proteins found in other species as compared to human Endolyn (SEQ ID NO: 5). The equivalent domains of these other species can be used to generate the bicistronic LAMP constructs described herein and are readily identifiable by comparing the domains identified for human Endolyn in FIG. 2 and FIG. 8 to the alignments shown in FIG. 8.

[0205] FIG. 9 provides alignment of Macrosialin proteins found in other species as compared to human Macrosialin (SEQ ID NO:80). The equivalent domains of these other species can be used to generate the bicistronic LAMP constructs described herein and are readily identifiable by comparing the domains identified for human Macrosialin in FIG. 2 and FIG. 9 to the alignments shown in FIG. 9.

[0206] FIG. 10 provides alignment of LAMP-5 proteins found in other species as compared to human LAMP-5 (SEQ ID NO: 93). The equivalent domains of these other species can be used to generate the bicistronic LAMP constructs described herein and are readily identifiable by comparing the domains identified for human LAMP-5 in FIG. 2 and FIG. 10 to the alignments shown in FIG. 10.

[0207] FIG. 11 shows design of the exemplary bicistronic construct HER2-LAMP-sCD40L.

[0208] FIG. 12 shows detection of sCD40L in the supernatant of 293T cells transfected with bicistronic HER2-LAMP-sCD40L vaccine. The asterisk marks the protein band that indicates the presence of sCD40L. Immunoprecipitation experiment with a biotinylated anti-CD40L antibody was used to detect sCD40L in control 293T cells, 293T cells transfected with bicistronic HER2-LAMP-sCD40L, or 293T cells transfected with a control vector expressing GFP. Cell culture supernatant was used as Input (I). Flowthrough (FT) marks proteins that didn't bind to the biotinylated anti-CD40L whereas Bound (B) marks proteins that bind to the biotinylated anti-CD40L antibody.

[0209] FIGS. 13A-D show detection of Spike-specific T cell response in mice after one immunization (FIGS. 13A-B) or two immunizations (FIGS. 13C-D) of ITI-bicistronic vaccine or 2-V COVID vaccine. FIGS. 13A and 13C: ELISPOT. FIGS. 13B and 13D: spot counts. CV=control vector (plasmid alone). SFC=spot forming cells. Student T test was used to determine significance. * p<0.05, ** p<0.01, *** p<0.001.

[0210] FIG. 14 shows detection of spike specific CD4 and CD8 T cells by flow cytometry. Both CD4+ and CD8+ T cell responses were enhanced after vaccination with 2-V vaccine.

[0211] FIG. 15 shows intracellular cytokine staining (ICS) of IFNγ, TNFα, and IL-2 in CD4+ and CD8+ T cells.

[0212] FIGS. 16A-F show measurements of S1-specific antibodies after one immunization (FIGS. 16A, 16C, and 16E) vs 2 immunizations (FIGS. 16B, 16D, and 16F) with either ITI-bicistronic vaccine or 2-V vaccine. Student T test was used to determine significance.

[0213] FIGS. 17A-B detection of HER2-LAMP-sCD40L in the supernatant of transfected 293T cells. FIG. 17A shows a sCD40L standard curve for ELISA. FIG. 17B shows detection of sCD40L in the supernatant. Control cells=cells without transfection with a bicistronic construct.

[0214] FIGS. 18A-F show bicistronic vaccines are capable of eliciting robust T-cell and antibody response. FIG. 18A show an exemplary vaccination schedule where mice were immunized by intradermal (ID) injection with 20 μg of control vector, HER2-LAMP, or bicistronic HER2-LAMP-sCD40L. FIG. 18B shows IFNγ spot forming cells (ELISPOT). FIG. 18C shows mean IFNγ spot-forming cells±SEM. FIG. 18D-F show HER2-specific total IgG (FIG. 18D), IgG1 (FIG. 18E), and IgG2a (FIG. 18F) by ELISA; N=7. One-way ANOVA was used for statistical analysis. * p<0.05, ** p<0.01, *** p<0.001, **** p<0.0001.

[0215] FIGS. 19A-B show intracellular staining for cytokines IFNγ (IFNg), TNFα (TNFa), and IL-2 in CD4 and CD8 T cells. FIG. 19A show % of stained cells as mean±SEM. FIG. 19B show representative FACS plots. * p<0.05, ** p<0.01, *** p<0.001.

[0216] FIG. 20 shows HER2-specific antibody responses as determined by ELISA.

[0217] FIGS. 21A-B show HER2-LAMP-sCD40L protects mice form HER2-expressing breast tumor. FIG. 21A shows results by ELISPOT. FIG. 21B show tumor size as measured with a caliper.

[0218] FIGS. 22A-B show HER2-LAMP-sCD40L enhances survival in mice. FIG. 22A is a schematic of the experimental design. FIG. 22B shows mouse survival after tumor challenge in a single experiment. N=10.

[0219] FIG. 23 shows the effect of HER2-LAMP vaccines with immune response enhancing-genes (IREG; HER2-LAMP-IREG) on tumor volume. IREG=CD40L, Flt3L, IL-21, IL-12, and OX40L. ** p<0.01; **** p<0.0001.

[0220] FIG. 24 shows the effect of HER2-LAMP-IREG on mouse survival.

[0221] FIG. 25 shows HER2-LAMP-IL-15 induces strong antigen specific antibody response as determined by ELISA. N=5 per group. T-test was used for statistical analysis. * p<0.05, ** p<0.01.

[0222] FIG. 26 shows HER2-LAMP-IL-15 elicits strong T cell response as determined by ELISPOT. Data represent mean IFNγ spot forming cells±SEM. N=5. T-test was used for statistical analysis. * p<0.05, ** p<0.01.

[0223] FIGS. 27A-B show two doses of HER2-LAMP-IL-15 elicit strong T cell response as determined by ELISPOT. Data represent original spots (FIG. 27A) and mean IFNγ spot forming cells±SEM (FIG. 27B). N=5. T-test was used for statistical analysis. * p<0.05, ** p<0.01, *** p<0.001, *** p<0.0001.

[0224] FIGS. 28A-C relate to the first generation bicistronic LAMP construct comprising SARS CoV-2 S1 spike protein. FIG. 28A illustrates the general scheme of a vector (bicistronic-S1-LAMP-EF1 IgK-S 2P; 7427 bp) encoding a first generation bicistronic LAMP construct (based on ILC-4) comprising a fragment of the SARS COV-2 S1 spike protein as a target antigen, and including an expression cassette for expressing the SARS COV-2 S2 spike protein operably linked to an Ig-kappa leader (secretion signal), as a second antigen for secretion. FIG. 28B is another representation (as a circular plasmid) of the first-generation ITI-COVID bicistronic construct, showing a representative, yet preferred, example of the arrangement of polynucleotides encoding sequences. FIG. 28C shows the complete polynucleotide and encoded polypeptide domains of the first-generation ITI-COVID bicistronic construct.

[0225] FIGS. 29A-D show suppression of tumor growth by a bicistronic HER2-LAMP-sCD40L (soluble CD40 ligand) administered as a DNA vector in a murine TSA breast cancer model compared to control (CV) and non-bicistronic HER2-LAMP vectors. FIG. 29A shows the experimental protocol. FIG. 29B shows changes in tumor growth for each mouse, while FIG. 29C shows changes in tumor growth for the seven mice in each group (control, HER2-LAMP and HER2-LAMP-sCD40L). Control (CV; top-most curves) is depicted by closed circles; HER2-LAMP (middle curve in FIG. 29C) by closed squares; HER2-LAMP-sCD40L (bottom curve in FIG. 29C) by closed triangles. FIG. 29D shows tumor weight measured at the termination of the experiment (* indicates p<0.05 while ** indicates p<0.01).

[0226] FIG. 30 shows that HER2-LAMP-sCD40L induces production of CD3+ memory T cells compared to the control vector.

[0227] FIGS. 31A-C show that HER2-LAMP-sCD40L promotes infiltration of T cells into the tumor microenvironment compared with HER2-LAMP and control vectors. FIG. 31A shows the number of CD3+ T cells in tumors, after tumors were obtained, cleaned, and dissociated.

[0228] FIG. 31B shows the number of CD4+ T cells. FIG. 31C shows the number of CD8+ T cells. * indicates p<0.05 while ** indicates p<0.01.

[0229] FIG. 32A-C show that soluble CD40 ligand (sCD40L) produced by the HER2-LAMP-sCD40L vector enhances activation of type 1 dendritic cells (DC1) producing IL-12 in draining lymph nodes. FIG. 32A shows the gating protocol used in the experiment, while FIG. 32B shows CD8-expressing DC1 cells and FIG. 32C shows IL-12 producing DC1 cells. * indicates p<0.05.

[0230] FIG. 33A-B show that bicistronic HER2-LAMP-sCD40L activates inflammatory signals in the tumor microenvironment. Specifically, FIG. 33A shows the number of CD4+ CD69+ cells in tumors and FIG. 33B shows the number of CD8+ CD69+ cells in tumors, after tumors were obtained, cleaned, and dissociated. * indicates p<0.05.

[0231] FIG. 34A-B show that bicistronic HER2-LAMP-sCD40L promotes T cells producing PD-1 in the tumor microenvironment. Specifically, FIG. 33A shows the number of CD4+ PD-1+ cells in tumors and FIG. 33B shows the number of CD8+ PD-1+ cells in tumors, after tumors were obtained, cleaned, and dissociated. * indicates p<0.05 while ** indicates p<0.01.

[0232] FIG. 35 shows results of ELISPOT analysis of splenocytes from mice following the protocol described in FIG. 29A after incubation of splenocytes with several different pooled peptides of HER2 extracellular domain. The results show that the bicistronic HER2-LAMP-sCD40L induced a stronger response against certain pooled HER2 peptides than control or HER2-LAMP constructs.

[0233] FIG. 36 shows results from a parallel experiment to those described in FIGS. 29A-C, with 5 mice per control, HER2-LAMP and HER2-LAMP-sCD40L group, confirming that the bicistronic construct suppresses tumor growth more than the other two groups with p<0.05.

[0234] FIG. 37A-D show results of FACS analysis of splenocytes from the experiment shown in FIG. 36 (following the protocol of FIG. 29A), and shows that HER2-LAMP-sCD40L induces polyfunctional CD4 effector memory T cells (“TEM” cells) in the spleen. FIG. 37A shows percentage of CD4 TEM cells; FIG. 37B shows percentage of CD8 TEM cells. The amount of the CD4 or CD8 TEM cells expressing IFNg, TNFa, or both IFNg and TNFa are denoted in the bar graphs. The remaining figure panels show response to pooled HER2 peptides by CD4 TEM cells (FIG. 37C) or CD8 TEM cells (FIG. 37D) expressing both IFNg and TNFa. * P<0.05, ** p<0.01, **** p<0.0001.

[0235] FIG. 38A-B show that soluble CD40L expressed from the HER2-LAMP-sCD40L construct in the murine TSA model of FIG. 29A enhances activation of DC1 dendritic cells in the spleen. The FACS gating strategy is shown in FIG. 38A while the percentage of DC1 dendritic cells is shown in FIG. 38B. * indicates p<0.05 while ** indicates p<0.01.

[0236] FIG. 39A-B show results from cell staining experiments indicating that soluble CD40L expressed from the HER2-LAMP-sCD40L construct in the murine TSA model of FIG. 29A increases the presence of CD4+ (FIG. 39A) and CD8+ T cells (FIG. 39B) in the tumors.

[0237] FIGS. 40A-B show results from experiments in which mice were injected with a control vector (CV), Her2-LAMP (i.e., HER2-Hinge-LAMP), Her2-LAMP-sCD40L, Her2-LAMP-mFlt3L, or a combination of both Her2-LAMP-sCD40L and Her2-LAMP-mFlt3L (7 mice per group), followed by ELISPOT analysis of splenocytes. FIG. 40A shows mean IFNg forming cells +/−SEM for each group, while FIG. 40B shows the number of cells recognizing various HER2 peptide pools from each of the 5 groups.

[0238] FIG. 41 shows antibody titer determined by ELISA for each of the groups of FIG. 40A.

[0239] FIGS. 42A-D show the percentage of various CD4 and CD8 TEM cells recognizing various HER2 extracellular domain peptide pools following the experiment of FIG. 40A, specifically CD8 IFNg TNFa cells (FIG. 42A), CD8 IFNg cells (FIG. 42B), CD4 IFNg TNFa cells (FIG. 42C), and CD4 IFNg cells (FIG. 42D).

[0240] FIG. 43 shows the effect on serum antibody titer of combined administration of two bicistronic constructs HER2-LAMP-IL-12 and HER2-LAMP-mFlt3L, as measured by ELISA.

### DETAILED DESCRIPTION

[0241] The disclosure encompasses, for example, nucleic acid molecules encoding bicistronic or multicistronic LAMP constructs which can be used to generate vaccines and/or used to raise antibodies and/or a humoral immune response. The nucleic acid molecules can be used to induce an immune response. In one aspect, the disclosure provides methods for treating a subject with an allergy, infectious disease such as a coronavirus or Covid-19, diabetes, cancer or a hyperproliferative disorder by providing a nucleic acid molecule (e.g., a plasmid or vector) encoding a bicistronic LAMP construct described herein. The nucleic acid molecules encoding bicistronic LAMP constructs can also be used to raise antibodies in non-human vertebrates, and in preferably, non-human mammals.

### A. Definitions

[0242] The following definitions are provided for specific terms which are used in the following written description.

[0243] As used in the specification and claims, the singular form “a”, “an” and “the” include plural references unless the context clearly dictates otherwise. For example, the term “a cell” includes a plurality of cells, including mixtures thereof. The term “a nucleic acid molecule” includes a plurality of nucleic acid molecules.

[0244] As used herein, the term “comprising” is intended to mean that the nucleic acid molecules or the bicistronic LAMP constructs and methods include the recited elements, but do not exclude other elements. In the case of an amino acid or nucleotide sequence, it is intended to mean that other sequence elements may be added to either end of the sequence. “Consisting essentially of”, when used to define nucleic acid molecules, bicistronic LAMP constructs and methods, shall mean excluding other elements of any essential significance to the combination or its function. Thus, a bicistronic LAMP construct consisting essentially of the elements as defined herein would not exclude trace contaminants from the isolation and purification method and pharmaceutically acceptable carriers, such as phosphate buffered saline, preservatives, and the like. “Consisting of” shall mean excluding more than trace elements of other ingredients and substantial method steps for administering nucleic acid molecules encoding the bicistronic LAMP constructs described herein. In the case of an amino acid or nucleotide sequence, “consisting of” indicates that no further sequence elements are added to either end of the sequence, but the recited sequence would be allowed to incorporate modifications to the amino acids or nucleotides that occur physiologically such as DNA methylations or glycosylations or the like. Embodiments defined by each of these transition terms are within the scope of this disclosure.

[0245] The term “about” or “approximately” means within an acceptable range for the particular value as determined by one of ordinary skill in the art, which will depend in part on how the value is measured or determined, e.g., the limitations of the measurement system. For example, “about” can mean a range of up to 20%, preferably up to 10%, more preferably up to 5%, and more preferably still up to 1% of a given value. Alternatively, particularly with respect to biological systems or processes, the term can mean within an order of magnitude, preferably within 5-fold, and more preferably within 2 fold, of a value. Unless otherwise stated, the term “about” means within an acceptable error range for the particular value, such as ±1-20%, preferably ±1-10% and more preferably ±1-5%.

[0246] Where a range of values is provided, it is understood that each intervening value, between the upper and lower limit of that range and any other stated or intervening value in that stated range is encompassed within the disclosure. The upper and lower limits of these smaller ranges may independently be included in the smaller ranges, and are also encompassed within the disclosure, subject to any specifically excluded limit in the stated range. Where the stated range includes one or both of the limits, ranges excluding both of those included limits are also included in the disclosure.

[0247] As used herein, “the lysosomal/endosomal compartment” refers to membrane-bound acidic vacuoles containing LAMP molecules in the membrane, hydrolytic enzymes that function in antigen processing, and MHC class II molecules for antigen recognition and presentation. This compartment functions as a site for degradation of foreign materials internalized from the cell surface by any of a variety of mechanisms including endocytosis, phagocytosis and pinocytosis, and of intracellular material delivered to this compartment by specialized autolytic phenomena (de Duve, Eur. J. Biochem. 137:391, 1983). The term “endosome” as used herein encompasses a lysosome.

[0248] As used herein, a “lysosome-related organelle” refers to any organelle which comprises lysosymes and includes, but is not limited to, MIIC, CIIV, melanosomes, secretory granules, lytic granules, platelet-dense granules, basophil granules, Birbeck granules, phagolysosomes, secretory lysosomes, and the like. Preferably, such an organelle lacks mannose 6-phosphate receptors and comprises LAMP, but may or may not comprise an MHC class II molecule. For reviews, see, e.g., Blott and Griffiths, Nature Reviews, Molecular Cell Biology, 2002; Dell'Angelica, et al., The FASEB Journal 14:1265-1278, 2000.

[0249] As used herein, the terms “polynucleotide” and “nucleic acid molecule” are used interchangeably to refer to polymeric forms of nucleotides of any length. The polynucleotides may contain deoxyribonucleotides, ribonucleotides, and/or their analogs. Thus, in some cases, bicistronic LAMP construct nucleic acid molecule herein can be a DNA molecule, such as a DNA vector, e.g., a DNA virus vector, and in other cases it can be an RNA molecule, including a self-amplifying RNA vector (also known as a self-replicating RNA vector).

[0250] Nucleotides may have any three-dimensional structure, and may perform any function, known or unknown. Depending on context, the term “polynucleotide” also includes, for example, single-, double-stranded and triple helical molecules, a gene or gene fragment, exons, introns, mRNA, tRNA, rRNA, ribozymes, antisense molecules, cDNA, recombinant polynucleotides, branched polynucleotides, aptamers, plasmids, vectors, isolated DNA of any sequence, isolated RNA of any sequence, nucleic acid probes, and primers. A nucleic acid molecule may also comprise modified nucleic acid molecules (e.g., comprising modified bases, sugars, and/or internucleotide linkers).

[0251] As used herein, the term “peptide” refers to a compound of two or more subunit amino acids, amino acid analogs, or peptidomimetics. The subunits may be linked by peptide bonds or by other bonds (e.g., as esters, ethers, and the like).

[0252] As used herein, the term “amino acid” refers to either natural and/or unnatural or synthetic amino acids, including glycine and both D or L optical isomers, and amino acid analogs and peptidomimetics. A peptide of three or more amino acids is commonly called an oligopeptide if the peptide chain is short. If the peptide chain is long (e.g., greater than about 10 amino acids), the peptide is commonly called a polypeptide or a protein. While the term “protein” encompasses the term “polypeptide”, a “polypeptide” may be a less than full-length protein.

[0253] As used herein a “LAMP protein” or “LAMP polypeptide” refers to any of the mammalian lysosomal associated membrane proteins human LAMP-1, human LAMP-2, human LAMP-3, human LIMP-2, human Endolyn, human LIMBIC, human LAMP-5, or human Macrosialin as described herein, as well as orthologs (such as, for example, the LAMP proteins shown in FIGS. 3-10), and their allelic variants. As used herein, LAMP-1, LAMP2, LAMP-3, LIMP 2, Macrosialin, Endolyn, LAMP5 or LIMBIC refer to the human proteins and their allelic variants as noted in FIGS. 3-10 unless explicitly noted otherwise.

[0254] As used herein, a LAMP “homology domain” comprises at least the 4 uniformly spaced cysteine residues shown in FIGS. 3-10. These cysteine resides are labeled 1, 2, 3, and 4 (and in LIMP-2 and Macrosialin-five cysteines are identified, LIMBIC-six cysteines are identified and Endolyn-eight cysteines are identified) in each Homology Domain as shown in FIGS. 3-10 and are defined herein as the “Cysteine Conserved Fragment.” Additional amino acids can be included to either the N-terminus end and/or the C-terminus end of the Cysteine Conserved Fragment to generate, up to and including a full Homology Domain of a LAMP protein. These additional added amino acids can be derived from the Homology Domain from which the Cysteine Conserved Fragment is derived or from other LAMP Protein Homology Domains. Thus, as used herein, a LAMP Homology Domain comprises and/or consists of one Cysteine Conserved Fragment. At least two LAMP Homology Domains make up the Luminal Domain of LAMP-1, LAMP-2, LAMP-3, or Endolyn.

[0255] As used herein, “expression” refers to the process by which polynucleotides are transcribed into mRNA and/or translated into peptides, polypeptides, or proteins. If the polynucleotide is derived from genomic DNA, expression may include splicing of the mRNA transcribed from the genomic DNA.

[0256] As used herein, “under transcriptional control” or “operably linked” refers to expression (e.g., transcription or translation) of a polynucleotide sequence which is controlled by an appropriate juxtaposition of an expression control element and a coding sequence. In one aspect, a nucleic acid sequence is “operably linked” to an expression control sequence when the expression control sequence controls and regulates the transcription of that sequence. In another context, the term “operably linked” refers to the linkage of a peptide, polypeptide or proteins such as an epitope or antigen with a signal sequence, such as a secretion signal sequence to bring about the secretion of the peptide, polypeptide or protein from a host cell.

[0257] As used herein, “signal sequence” or “signal peptide” denotes an endoplasmic reticulum translocation sequence. This sequence encodes a signal peptide that communicates to a cell to direct a polypeptide to which it is linked (e.g., via a chemical bond) to an endoplasmic reticulum vesicular compartment, to enter an exocytic/endocytic organelle, to be delivered either to a cellular vesicular compartment, the cell surface or to secrete the polypeptide. This signal sequence is sometimes clipped off by the cell in the maturation of a polypeptide. Signal sequences can be found associated with a variety of proteins native to prokaryotes and eukaryotes. A “secretion signal sequence” refers to a signal sequence that results in the polypeptide to which it is attached being secreted by a cell.

[0258] As used herein, “coding sequence” is a sequence which is transcribed and translated into a peptide, polypeptide or protein when placed under the control of appropriate expression control sequences. The boundaries of a coding sequence are determined by a start codon at the 5′ (amino) terminus and a translation stop codon at the 3′ (carboxyl) terminus. A coding sequence can include, but is not limited to, a prokaryotic sequence, cDNA from eukaryotic mRNA, a genomic DNA sequence from eukaryotic (e.g., mammalian) DNA, and even synthetic DNA sequences. A polyadenylation signal and transcription termination sequence will usually be located 3′ to the coding sequence.

[0259] As used herein, two coding sequences “correspond” to each other if the sequences or their complementary sequences encode the same amino acid sequences.

[0260] As used herein, “trafficking” denotes movement or progression of the polypeptide encoded by the bicistronic LAMP construct through cellular organelles or compartments in the pathway from the rough endoplasmic reticulum to the endosomal/lysosomal compartment or related organelles where antigen processing and binding to MHC II occurs.

[0261] The term “antigen” or “antigen of interest” as used herein covers any polypeptide sequence encoded by a polynucleotide sequence cloned into the nucleic acid molecules encoding a bicistronic LAMP construct which is used to elicit an innate or adaptive immune response. An “antigen” encompasses both a single antigen as well as multiple antigenic sequences (derived from the same or different proteins). In some cases, the “antigen” provides particular “epitopes” or antibody recognition sites. In some cases, the “antigen” is a “target antigen,” meaning that it represents a specific protein expressed by diseased cells, such as a tumor antigen expressed by tumor cells, or a particular foreign antigen from an infectious disease such as a Spike protein from a coronavirus or other type of virus. In some cases, the antigen is expressed within a LAMP fusion protein, creating a “LAMP-antigen Construct.” The different arrangements of LAMP-antigen Constructs that can be used herein are illustrated in FIG. 1 as ILC-1-ILC-6.

[0262] As used herein, a “bicistronic LAMP construct” and a “bicistronic LAMP construct comprising an antigen” and a “bicistronic LAMP construct comprising a target antigen” and a “bicistronic LAMP construct comprising an antigen of interest” and a “bicistronic LAMP-antigen construct” are used interchangeably, and refer to a nucleic acid construct that encodes or expresses two polypeptides, i.e. a first polypeptide comprising a LAMP-antigen construct and a second polypeptide, which in some embodiments may encode an IREG polypeptide or a second antigen. In some cases, a bicistronic LAMP construct nucleic acid molecule herein can be a DNA molecule, such as a DNA vector, e.g., a DNA virus vector, and in other cases it can be an RNA molecule, including a self-amplifying RNA vector (also known as a self-replicating RNA vector). In other cases, based on the context, a “bicistronic LAMP construct” refers to the polypeptides that are collectively expressed from the nucleic acid construct.

[0263] As used herein, an “immune response element,” or “immune response enhancing gene” or “IREG” broadly refers to a gene encoding a protein that may enhance an immune response in a subject, such as a humoral and/or cellular immune response. In some cases, the abbreviation IREG may also be used to refer to the encoded polypeptide of such a gene, or an extracellular domain of such a protein, or a fusion molecule comprising such a protein or extracellular domain. Examples of IREGs include certain cytokines or immune proteins, such as CD40L, CD80, OX40, Flt3L, GM-CSF, IL-12, IL-21, IL-23, IL-15, CD70, CD86, IL-7, IL-18, or IL-33.

[0264] As used herein, an “bicistronic LAMP construct delivery vehicle” is defined as any molecule or group of molecules or macromolecules that can carry a nucleic acid molecule encoding a bicistronic LAMP construct into a host cell.

[0265] As used herein, “bicistronic LAMP construct delivery,” or “bicistronic LAMP construct transfer,” refers to the introduction of a nucleic acid molecule encoding a bicistronic LAMP construct into a host cell, irrespective of the method used for the introduction. The introduced nucleic acid molecule may be stably or transiently maintained in the host cell. Stable maintenance typically requires that the introduced nucleic acid molecule encoding the bicistronic LAMP construct either contains an origin of replication compatible with the host cell or integrates into a replicon of the host cell such as an extrachromosomal replicon (e.g., a plasmid) or a nuclear or mitochondrial chromosome.

[0266] As used herein, a “viral bicistronic LAMP construct” refers to a virus or viral particle that comprises a nucleic acid molecule comprising the bicistronic LAMP construct to be delivered into a host cell, either in vivo, ex vivo or in vitro. Examples of viral bicistronic LAMP constructs include, but are not limited to, adenovirus vectors, adeno-associated virus vectors, retroviral vectors, and the like. In aspects where gene transfer is mediated by an adenoviral vector, a viral bicistronic LAMP construct includes the adenovirus genome or part thereof, and a selected, non-adenoviral gene, in association with adenoviral capsid proteins.

[0267] As used herein, “adenoviral-mediated gene transfer” or “adenoviral transduction” refers to the process by which a nucleic acid molecule encoding a bicistronic LAMP construct is transferred into a host cell by virtue of the adenovirus entering the cell. Preferably, the nucleic acid molecule is able to replicate and/or integrate and be transcribed within the cell.

[0268] As used herein, “adenovirus particles” are individual adenovirus virions comprised of an external capsid and a nucleic acid molecule encoding a bicistronic LAMP construct, where the capsid is further comprised of adenovirus envelope proteins. The adenovirus envelope proteins may be modified to comprise a fusion polypeptide which contains a polypeptide ligand covalently attached to the viral protein, e.g., for targeting the adenoviral particle to a particular cell and/or tissue type.

[0269] As used herein, the term “administering” or “immunizing” or “injecting” a nucleic acid molecule encoding a bicistronic LAMP construct refers to transducing, transfecting, microinjecting, electroporating, or shooting the cell with the nucleic acid molecule. In some aspects, nucleic acid molecules encoding a bicistronic LAMP construct are introduced into a target cell by contacting the target cell with a delivery cell (e.g., by cell fusion or by lysing the delivery cell when it is in proximity to the target cell).

[0270] The term “treat” or “treatment” other like, as used herein, refers broadly to an improvement or amelioration of a disease or disorder in a subject, such as the improvement or amelioration of at least one symptom or marker associated with the disease or disorder, such as, in the case of a tumor, for example, reduction in the size of the tumor, or a change in biochemical markers associated with the tumor, or reduction in disease symptoms. In the case of a disease, such as a cancer or infectious disease, treat or treatment also refers to the reduction in at least one symptom of the disease or disorder. Treat or treatment also refers to prevention of the onset or slowing of the onset of a disease or disorder, or prevention or reduction of one or more symptoms upon onset (e.g, including development an asymptomatic disease vs. a symptomatic one), for example. Treat or treatment also refers to use in immunization or vaccination, for example, to induce an immune response in a subject that may, for example, prevent onset of symptoms, reduce severity of symptoms, or improve at least one existing symptom of a disease or disorder in a subject.

[0271] As used herein, the phrase “target enhancement” or simply “enhancement” of an immune response describes the use of a nucleic acid molecule encoding a “LAMP-antigen Construct” comprising a target antigen related to the disease or disorder to be treated in a LAMP fusion polypeptide, and (2) a further secreted polypeptide encoding a protein intended to enhance an immune response (i.e. an IREG protein). In general, such target enhancement allows for delivery of target antigens and secreted IREGs simultaneously. In some embodiments, this approach may improve both humoral and cellular immune responses.

[0272] The term “secreted” as used herein refers to processes and pathways within cells which result in a peptide, polypeptide or protein being transported through the cell wall such that the peptide, polypeptide or protein is released into the extracellular environment and may, for example, enter the circulation of a subject. A peptide, polypeptide or protein destined for the extracellular environment (i.e., to be secreted) will typically be provided with a secretion signal sequence, generally located at the N-terminus, which directs the ribosomes translating the peptide, polypeptide or protein to the rough endoplasmic reticulum (rough ER), from where newly made peptide, polypeptide or protein may be incorporated into small transport or secretory vesicles which transport the peptide, polypeptide or protein to the cell surface for release.

[0273] As used herein, “hybridization” refers to a reaction in which one or more polynucleotides react to form a complex that is stabilized via hydrogen bonding between the bases of the nucleotide residues. The hydrogen bonding may occur by Watson-Crick base pairing, Hoogstein binding, or in any other sequence-specific manner. The complex may comprise two strands forming a duplex structure, three or more strands forming a multi-stranded complex, a single self-hybridizing strand, or any combination of these. A hybridization reaction may constitute a step in a more extensive process, such as the initiation of a PCR reaction, or the enzymatic cleavage of a polynucleotide by a ribozyme.

[0274] As used herein, a polynucleotide or polynucleotide region (or a polypeptide or polypeptide region) which has a certain percentage (for example, at least 50%, at least 60%, at least 70%, at least 80%, at least 85%, at least 90%, at least 95%, at least 99%) of “sequence identity” to another sequence means that, when maximally aligned, using software programs routine in the art, that percentage of bases (or amino acids) are the same in comparing the two sequences.

[0275] Two sequences are “substantially homologous” or “substantially similar” when at least 50%, at least 60%, at least 70%, at least 75%, at least 80%, at least 90 or at least 95% of the nucleotides match over the defined length of the DNA sequences. Similarly, two polypeptide sequences are “substantially homologous” or “substantially similar” when at least 50%, at least 60%, at least 66%, at least 70%, at least 75%, at least 80%, at least 90 or at least 95% of the amino acid residues of the polypeptide match over a defined length of the polypeptide sequence. Sequences that are substantially homologous can be identified by comparing the sequences using standard software available in sequence data banks. Substantially homologous nucleic acid sequences also can be identified in a Southern hybridization experiment under, for example, stringent conditions as defined for that particular system. Defining appropriate hybridization conditions is within the skill of the art. For example, stringent conditions can be: hybridization at 5×SSC and 50% formamide at 42° C., and washing at 0.1×SSC and 0.1% sodium dodecyl sulfate at 60° C. Further examples of stringent hybridization conditions include: incubation temperatures of about 25 degrees C. to about 37 degrees C.; hybridization buffer concentrations of about 6×SSC to about 10×SSC; formamide concentrations of about 0% to about 25%; and wash solutions of about 6×SSC. Examples of moderate hybridization conditions include: incubation temperatures of about 40 degrees C. to about 50 degrees C.; buffer concentrations of about 9×SSC to about 2×SSC; formamide concentrations of about 30% to about 50%; and wash solutions of about 5×SSC to about 2×SSC. Examples of high stringency conditions include: incubation temperatures of about 55 degrees C. to about 68 degrees C.; buffer concentrations of about 1×SSC to about 0.1×SSC; formamide concentrations of about 55% to about 75%; and wash solutions of about 1×SSC, 0.1×SSC, or deionized water. In general, hybridization incubation times are from 5 minutes to 24 hours, with 1, 2, or more washing steps, and wash incubation times are about 1, 2, or 15 minutes. SSC is 0.15 M NaCl and 15 mM citrate buffer. It is understood that equivalents of SSC using other buffer systems can be employed. Similarity can be verified by sequencing, but preferably, is also or alternatively, verified by function (e.g., ability to traffic to an endosomal compartment, and the like), using assays suitable for the particular domain in question.

[0276] The terms “percent (%) sequence similarity”, “percent (%) sequence identity”, and the like, generally refer to the degree of identity or correspondence between different nucleotide sequences of nucleic acid molecules or amino acid sequences of polypeptides that may or may not share a common evolutionary origin (see Reeck et al., supra). Sequence identity can be determined using any of a number of publicly available sequence comparison algorithms, such as BLAST, FASTA, DNA Strider, GCG (Genetics Computer Group, Program Manual for the GCG Package, Version 7, Madison, Wisconsin), etc.

[0277] To determine the percent identity between two amino acid sequences or two nucleic acid molecules, the sequences are aligned for optimal comparison purposes. The percent identity between the two sequences is a function of the number of identical positions shared by the sequences (i.e., percent identity=number of identical positions/total number of positions (e.g., overlapping positions)×100). In one embodiment, the two sequences are, or are about, of the same length. The percent identity between two sequences can be determined using techniques similar to those described below, with or without allowing gaps. In calculating percent sequence identity, typically exact matches are counted.

[0278] The determination of percent identity between two sequences can be accomplished using a mathematical algorithm. A non-limiting example of a mathematical algorithm utilized for the comparison of two sequences is the algorithm of Karlin and Altschul, Proc. Natl. Acad. Sci. USA 1990, 87:2264, modified as in Karlin and Altschul, Proc. Natl. Acad. Sci. USA 1993, 90:5873-5877. Such an algorithm is incorporated into the NBLAST and XBLAST programs of Altschul et al, J. Mol. Biol. 1990; 215:403. BLAST nucleotide searches can be performed with the NBLAST program, score=100, wordlength=12, to obtain nucleotide sequences homologous to sequences of the disclosure. BLAST protein searches can be performed with the NBLAST program, score=50, wordlength=3, to obtain amino acid sequences homologous to protein sequences of the disclosure. To obtain gapped alignments for comparison purposes, Gapped BLAST can be utilized as described in Altschul et al, Nucleic Acids Res. 1997, 25:3389. Alternatively, PSI-Blast can be used to perform an iterated search that detects distant relationship between molecules. See Altschul et al. (1997) supra. When utilizing BLAST, Gapped BLAST, and PSI-Blast programs, the default parameters of the respective programs (e.g., XBLAST and NBLAST) can be used. See ncbi.nlm.nih.gov/BLAST/on the WorldWideWeb.

[0279] Another non-limiting example of a mathematical algorithm utilized for the comparison of sequences is the algorithm of Myers and Miller, CABIOS 1988; 4: 11-17. Such an algorithm is incorporated into the ALIGN program (version 2.0), which is part of the GCG sequence alignment software package. When utilizing the ALIGN program for comparing amino acid sequences, a PAM120 weight residue table, a gap length penalty of 12, and a gap penalty of 4 can be used.

[0280] In one embodiment, the percent identity between two amino acid sequences is determined using the algorithm of Needleman and Wunsch (J. Mol. Biol. 1970, 48:444-453), which has been incorporated into the GAP program in the GCG software package (Accelrys, Burlington, MA; available at accelrys.com on the WorldWideWeb), using either a Blossum 62 matrix or a PAM250 matrix, a gap weight of 16, 14, 12, 10, 8, 6, or 4, and a length weight of 1, 2, 3, 4, 5, or 6. In yet another embodiment, the percent identity between two nucleotide sequences is determined using the GAP program in the GCG software package using a NWSgapdna.CMP matrix, a gap weight of 40, 50, 60, 70, or 80, and a length weight of 1, 2, 3, 4, 5, or 6. A particularly set of parameters (and the one that can be used if the practitioner is uncertain about what parameters should be applied to determine if a molecule is a sequence identity or homology limitation of the disclosure) is using a Blossum 62 scoring matrix with a gap open penalty of 12, a gap extend penalty of 4, and a frameshift gap penalty of 5.

[0281] Another non-limiting example of how percent identity can be determined is by using software programs such as those described in Current Protocols In Molecular Biology (F. M. Ausubel et al., eds., 1987) Supplement 30, section 7.7.18, Table 7.7.1. Preferably, default parameters are used for alignment. An alignment program is BLAST, using default parameters. In particular, programs are BLASTN and BLASTP, using the following default parameters: Genetic code=standard; filter=none; strand=both; cutoff=60; expect=10; Matrix=BLOSUM62; Descriptions=50 sequences; sort by=HIGH SCORE; Databases=non-redundant, GenBank+EMBL+DDBJ+PDB+GenBank CDS translations+SwissProtein+SPupdate+PIR. Details of these programs can be found at the following Internet address: http://www.ncbi.nlm.nih.gov/cgi-bin/BLAST.

[0282] Statistical analysis of the properties described herein may be carried out by standard tests, for example, t-tests, ANOVA, or Chi squared tests. Typically, statistical significance will be measured to a level of p=0.05 (5%), more preferably p=0.01, p=0.001, p=0.0001, p=0.000001

[0283] “Conservatively modified variants” of domain sequences also can be provided. With respect to particular nucleic acid sequences, conservatively modified variants refer to those nucleic acids which encode identical or essentially identical amino acid sequences, or where the nucleic acid does not encode an amino acid sequence, to essentially identical sequences.

[0284] Specifically, degenerate codon substitutions can be achieved by generating sequences in which the third position of one or more selected (or all) codons is substituted with mixed-base and/or deoxyinosine residues (Batzer, et al., 1991, Nucleic Acid Res. 19:5081; Ohtsuka, et al., 1985, J. Biol. Chem. 260:2605-2608; Rossolini et al., 1994, Mol. Cell. Probes 8:91-98). The term “biologically active fragment”, “biologically active form”, “biologically active equivalent” of and “functional derivative” of a wild-type protein, possesses a biological activity that is at least substantially equal (e.g., not significantly different from) the biological activity of the wild type protein as measured using an assay suitable for detecting the activity.

[0285] As used herein, “in vivo nucleic acid delivery, nucleic acid transfer, nucleic acid therapy” and the like, refer to the introduction of a nucleic acid molecule encoding a bicistronic LAMP construct as described herein directly into the body of a subject, such as a human or non-human mammal, whereby the nucleic acid molecule is introduced to a cell of such organism in vivo.

[0286] As used herein, the term “in situ” refers to a type of in vivo nucleic acid delivery in which the nucleic acid molecule encoding a bicistronic LAMP construct is brought into proximity with a target cell (e.g., the nucleic acid is not administered systemically). For example, in situ delivery methods include, but are not limited to, injecting a nucleic acid molecule encoding a bicistronic LAMP construct directly at a site (e.g., into a tissue, such as a tumor or heart muscle), contacting the nucleic acid molecule with cell(s) or tissue through an open surgical field, or delivering the nucleic acid molecule to a site using a medical access device such as a catheter.

[0287] As used herein, the term “isolated” or “purified” means separated (or substantially free) from constituents, cellular and otherwise, in which the polynucleotide, peptide, polypeptide, protein, antibody, or fragments thereof, are normally associated with in nature. For example, with respect to an isolated nucleic acid molecule encoding a bicistronic LAMP construct as described herein, an isolated polynucleotide is one that is separated from the 5′ and 3′ sequences with which it is normally associated in the chromosome. As is apparent to those of skill in the art, a non-naturally occurring polynucleotide, peptide, polypeptide, protein, antibody, or fragments thereof, does not require “isolation” to distinguish it from its naturally occurring counterpart. By substantially free or substantially purified, it is meant at least 50% of the population, preferably at least 70%, more preferably at least 80%, and even more preferably at least 90%, are free of the components with which they are associated in nature.

[0288] As used herein, a “target cell” or “recipient cell” refers to an individual cell or cell which is desired to be, or has been, a recipient of a nucleic acid molecule encoding a bicistronic LAMP construct described herein. The term is also intended to include progeny of a single cell, and the progeny may not necessarily be completely identical (in morphology or in genomic or total DNA complement) to the original parent cell due to natural, accidental, or deliberate mutation. A target cell may be in contact with other cells (e.g., as in a tissue) or may be found circulating within the body of an organism.

[0289] As used herein, a “subject” is a human unless specifically noted otherwise. In such other cases, a subject may be a mammal. Mammals include, but are not limited to, murines, simians, humans, farm animals, sport animals, and pets. In some cases, the “subject” is a rodent (e.g., a rat, a mouse or rabbit), a llama, camel, a cow, a guinea pig, a hamster, a dog, a cat, a horse, a non-human primate, a simian (e.g., a monkey or ape), a monkey (e.g., marmoset, baboon, rhesus macaque), or an ape (e.g., gorilla, chimpanzee, orangutan, gibbon). In some embodiments, non-human mammals, especially mammals that are conventionally used as models for demonstrating therapeutic efficacy in humans (e.g., murine, primate, porcine, canine, or rabbit animals) may be employed.

[0290] The terms “cancer,” “neoplasm,” and “tumor,” are used interchangeably and in either the singular or plural form, refer to cells that have undergone a malignant transformation that makes them pathological to the host organism. Primary cancer cells transformation that makes them pathological to the host organism. Primary cancer cells (that is, cells obtained from near the site of malignant transformation) can be readily distinguished from non-cancerous cells by well-established techniques, particularly histological examination. The definition of a cancer cell, as used herein, includes not only a primary cancer cell, but any cell derived from a cancer cell ancestor. This includes metastasized cancer cells, and in vitro cultures and cell lines derived from cancer cells. When referring to a type of cancer that normally manifests as a solid tumor, a “clinically detectable” tumor is one that is detectable on the basis of tumor mass, e.g., by procedures such as CAT scan, MR imaging, X-ray, ultrasound or palpation, and/or which is detectable because of the expression of one or more cancer-specific antigens in a sample obtainable from a patient.

[0291] In some embodiments, the cancer (including all stages of progression, including hyperplasia) is an adenocarcinoma, sarcoma, skin cancer, melanoma, bladder cancer, brain cancer, breast cancer, uterine cancer, ovarian cancer, prostate cancer, lung cancer (including, but not limited to NSCLC, SCLC, squamous cell cancer), colorectal cancer, anal cancer, rectal cancer, cervical cancer, liver cancer, head and neck cancer, oral cancer, salivary gland cancer, esophageal cancer, pancreas cancer, pancreatic ductal adenocarcinoma (PDA), renal cancer, stomach cancer, kidney cancer, multiple myeloma or cerebral cancer.

[0292] The nucleic acid molecules encoding bicistronic LAMP constructs as described herein can also be used to treat allergies, such as for example, food allergies (e.g., peanut allergens, such as Ara H1, H2 and/or H3), or environmental allergens, such as for example pollen (tree pollen, such as for example CRY J1 or CRY J2), dog dander, cat saliva, or dust mites.

[0293] In some cases, bicistronic LAMP constructs may include antigens useful in treatment of infectious diseases such as viral or bacterial diseases. In one example, bicistronic LAMP constructs may be used to treat coronavirus infections, such as from Covid-19.

[0294] Other diseases and/or disorders that can be treated with the bicistronic LAMP construct described herein include, for example, infectious disease and diabetes.

[0295] As used herein, the term “pharmaceutically acceptable carrier” encompasses any of the standard pharmaceutical carriers, such as a phosphate buffered saline solution, water, and emulsions, such as an oil/water or water/oil emulsion, and various types of wetting agents. Compositions comprising nucleic acid molecules encoding the bicistronic LAMP constructs also can include stabilizers and preservatives. For examples of carriers, stabilizers and adjuvants, see Martin Remington's Pharm. Sci., 15th Ed. (Mack Publ. Co., Easton (1975).

[0296] A cell has been “transformed”, “transduced”, or “transfected” by a nucleic acid molecule encoding a bicistronic LAMP construct when such a nucleic acid molecule has been introduced inside the cell. Transforming DNA may or may not be integrated (covalently linked) with chromosomal DNA making up the genome of the cell. In prokaryotes, yeast, and mammalian cells for example, the nucleic acid molecule encoding a bicistronic LAMP construct may be maintained on an episomal element, such as a plasmid. In a eukaryotic cell, a stably transformed cell is one in which the nucleic acid molecule encoding a bicistronic LAMP construct has become integrated into a chromosome so that it is inherited by daughter cells through chromosome replication. This stability is demonstrated by the ability of the eukaryotic cell to establish cell lines or clones comprised of a population of daughter cells containing the nucleic acid molecule. A “clone” is a population of cells derived from a single cell or common ancestor by mitosis. A “cell line” is a clone of a primary cell that is capable of stable growth in vitro for many generations (e.g., at least 10).

[0297] As used herein, an “effective amount” or “therapeutically effective amount” is an amount sufficient to affect beneficial or desired results, e.g., to treat a subject or induce an immune response in a subject.

[0298] An “antibody” is any immunoglobulin, including antibodies and fragments thereof, that binds a specific antigen. The term encompasses polyclonal, monoclonal, and chimeric antibodies (e.g., bispecific antibodies). An “antibody combining site” is that structural portion of an antibody molecule comprised of heavy and light chain variable and hypervariable regions that specifically binds antigen. Exemplary antibody molecules are intact immunoglobulin molecules, substantially intact immunoglobulin molecules, and those portions of an immunoglobulin molecule that contains the paratope, including Fab, Fab′, F(ab′)₂ and F (v) portions. Thus, the term antibody encompasses not only whole antibody molecules, but also antibody fragments as well as variants (including derivatives such as fusion proteins) of antibodies and antibody fragments. Examples of molecules which are described by the term “antibody” in this application include, but are not limited to: single chain Fvs (scFvs), Fab fragments, Fab′ fragments, F(ab′)₂, disulfide linked Fvs (sdFvs), Fvs, and fragments comprising or alternatively consisting of, either a VL or a VH domain. The term “single chain Fv” or “scFv” as used herein refers to a polypeptide comprising a VL domain of an antibody linked to a VH domain of an antibody. See Carter (2006) Nature Rev. Immunol. 6:243.

[0299] Additionally, antibodies that may be generated using the nucleic acid molecule encoding a bicistronic LAMP construct described herein include, but are not limited to, monoclonal, multi-specific, bi-specific, human, humanized, mouse, or chimeric antibodies, single chain antibodies, camelid antibodies, Fab fragments, F(ab′) fragments, anti-idiotypic (anti-Id) antibodies (including, e.g., anti-Id antibodies to antibodies of the disclosure), domain antibodies and epitope-binding fragments of any of the above. The immunoglobulin molecules can be of any type (e.g., IgG, IgE, IgM, IgD, IgA and IgY), class (e.g., IgG1, IgG2, IgG3, IgG4, IgA1 and IgA2) or subclass of immunoglobulin molecule.

[0300] As used herein, “human” antibodies include antibodies having the amino acid sequence of a human immunoglobulin and include antibodies isolated from human immunoglobulin libraries and xenomice or other organisms that have been genetically engineered to produce human antibodies. The nucleic acid molecules encoding a bicistronic LAMP construct described herein can be used in combination with known techniques for generating human antibodies and human monoclonal antibodies as described in the exemplified protocols, see, e.g., PCT publications WO 98/24893; WO 92/01047; WO 96/34096; WO 96/33735; European Patent No. 0 598 877; U.S. Pat. Nos. 5,413,923; 5,625,126; 5,633,425; 5,569,825; 5,661,016; 5,545,806; 5,814,318; 5,885,793; 5,916,771; and 5,939,598; and Lonberg and Huszar, Int. Rev. Immunol. 13:65-93 (1995).

[0301] Human antibodies or “humanized” chimeric monoclonal antibodies can be produced using the nucleic acid molecules encoding bicistronic LAMP constructs in combination with techniques described herein or otherwise known in the art. For example, standard methods for producing chimeric antibodies are known in the art. See, for review the following references: Morrison, Science 229:1202 (1985); Oi et al., BioTechniques 4:214 (1986); Cabilly et al., U.S. Pat. No. 4,816,567; Taniguchi et al., EP 171496; Morrison et al., EP 173494; Neuberger et al., WO 8601533; Robinson et al., WO 8702671; Boulianne et al., Nature 312:643 (1984); Neuberger et al., Nature 314:268 (1985).

[0302] Antibodies that may be generated using a nucleic acid molecule encoding a bicistronic LAMP construct described herein may be monovalent, bivalent, trivalent or multivalent. For example, monovalent scFvs can be multimerized either chemically or by association with another protein or substance. A scFv that is fused to a hexahistidine tag or a Flag tag can be multimerized using Ni-NTA agarose (Qiagen) or using anti-Flag antibodies (Stratagene, Inc.). Additionally, the nucleic acid molecule encoding a bicistronic LAMP construct can be used to generate monospecific, bispecific, trispecific or of greater multispecificity for the encoded antigen(s) contained in the bicistronic LAMP construct. See, e.g., PCT publications WO 93/17715; WO 92/08802; WO 91/00360; WO 92/05793; Tutt, et al., J. Immunol. 147:60-69 (1991); U.S. Pat. Nos. 4,474,893; 4,714,681; 4,925,648; 5,573,920; 5,601,819; Kostelny et.al., J. Immunol. 148:1547-1553 (1992).

[0303] An “epitope” is a structure, usually made up of a short peptide sequence or oligosaccharide, that is specifically recognized or specifically bound by a component of the immune system. T-cell epitopes have generally been shown to be linear oligopeptides. Two epitopes correspond to each other if they can be specifically bound by the same antibody. Two epitopes correspond to each other if both are capable of binding to the same B cell receptor or to the same T cell receptor, and binding of one antibody to its epitope substantially prevents binding by the other epitope (e.g., less than about 30%, preferably, less than about 20%, and more preferably, less than about 10%, 5%, 1%, or about 0.1% of the other epitope binds). It will be understood by the one of ordinary skill in the art that multiple epitopes can make up an antigen.

[0304] The term “antigen presenting cell” as used herein includes any cell which presents on its surface an antigen in association with a major histocompatibility complex molecule, or portion thereof, or, alternatively, one or more non-classical MHC molecules, or a portion thereof. Examples of suitable APCs are discussed in detail below and include, but are not limited to, whole cells such as macrophages, dendritic cells, B cells, hybrid APCs, and foster antigen presenting cells.

[0305] As used herein an “engineered antigen-presenting cell” refers to an antigen-presenting cell that has a non-natural molecular moiety on its surface. For example, such a cell may not naturally have a costimulator on its surface or may have an additional artificial costimulator in addition to a natural costimulator on its surface, or may express a non-natural class II molecule on its surface. In some embodiments, the engineered antigen-presenting cell has the antigen expressed from the bicistronic LAMP construct on its surface.

[0306] As used herein, “immune effector cells” refers to cells capable of binding an antigen and which mediate an immune response. These cells include, but are not limited to, T cells, B cells, monocytes, macrophages, NK cells and cytotoxic T lymphocytes (CTLs), for example CTL lines, CTL clones, and CTLs from tumor, inflammatory, or other infiltrates.

[0307] As used herein, “partially human” refers to a nucleic acid having sequences from both a human and a non-human vertebrate. In the context of partially human sequences, the partially human nucleic acids have sequences of human immunoglobulin coding regions and sequences based on the non-coding sequences of the endogenous immunoglobulin region of the non-human vertebrate. The term “based on” when used with reference to endogenous non-coding sequences from a non-human vertebrate refers to sequences that correspond to the non-coding sequence and share a relatively high degree of homology with the non-coding sequences of the endogenous loci of the host vertebrate, e.g., the non-human vertebrate from which the ES cell is derived. Preferably, the non-coding sequences share at least an 80%, more preferably 90% homology with the corresponding non-coding sequences found in the endogenous loci of the non-human vertebrate host cell into which a partially human molecule comprising the non-coding sequences has been introduced.

[0308] The term “immunoglobulin variable region” as used herein refers to a nucleotide sequence that encodes all or a portion of a variable region of an antibody molecule or all or a portion of a regulatory nucleotide sequence that controls expression of an antibody molecule. Immunoglobulin regions for heavy chains may include but are not limited to all or a portion of the V, D, J, and switch regions, including introns. Immunoglobulin region for light chains may include but are not limited to the V and J regions, their upstream flanking sequences, introns, associated with or adjacent to the light chain constant region gene.

[0309] By “transgenic animal” is meant a non-human animal, usually a mammal, having an exogenous nucleic acid sequence present as an extrachromosomal element in a portion of its cells or stably integrated into its germ line DNA (i.e., in the genomic sequence of most or all of its cells). In generating a transgenic animal comprising human sequences, a partially human nucleic acid is introduced into the germ line of such transgenic animals by genetic manipulation of, for example, embryos or embryonic stem cells of the host animal according to methods well known in the art.

[0310] A “vector” includes plasmids and viruses and any DNA or RNA molecule, whether self-replicating or not, which can be used to transform or transfect a cell.

[0311] As used herein, a “genetic modification” refers to any addition, deletion or disruption to a cell's normal nucleotides. Art recognized methods include viral mediated gene transfer, liposome mediated transfer, transformation, transfection and transduction, e.g., viral-mediated gene transfer such as the use of the nucleic acid molecules encoding bicistronic LAMP constructs based on DNA viruses such as adenovirus, adeno-associated virus and herpes virus, as well as retroviral based vectors.

[0312] The practice of the present disclosure employs in certain aspects, unless otherwise indicated, conventional molecular biology, microbiology, and recombinant DNA techniques within the skill of the art. Such techniques are explained fully in the literature. See, e.g., Maniatis, Fritsch & Sambrook, In Molecular Cloning: A Laboratory Manual (1982); DNA Cloning: A Practical Approach, Volumes I and II (D. N. Glover, ed., 1985); Oligonucleotide Synthesis (M. J. Gait, ed., 1984); Nucleic Acid Hybridization (B. D. Hames & S. J. Higgins, eds., 1985); Transcription and Translation (B. D. Hames & S. I. Higgins, eds., 1984); Animal Cell Culture (R. I. Freshney, ed., 1986); Immobilized Cells and Enzymes (IRL Press, 1986); B. Perbal, A Practical Guide to Molecular Cloning (1984).

[0313] Unless defined otherwise, all technical and scientific terms used herein have the same meaning as commonly understood by one of ordinary skill in the art to which this disclosure belongs. All publications mentioned herein are incorporated by reference for the purpose of describing and disclosing devices, formulations and methodologies that may be used in connection with the presently described disclosure.

### B. Exemplary LAMP-Antigen Fusion Polypeptides

[0314] The following are representative embodiments:

[0315] An isolated nucleic acid encoding a bicistronic LAMP construct, i.e. encoding a LAMP-antigen fusion protein (a LAMP Construct) and an immune enhancing protein such that both are expressed in a host cell or subject. In some cases, a nucleic acid herein may encode a multicistronic construct if a third polypeptide is also expressed, for example.

[0316] In some cases, the antigen is a target antigen for a particular disease or disorder. In some cases, the immune enhancing protein is a polypeptide or polypeptide domain, e.g., an extracellular domain, from an IREG, optionally fused to a further molecule such as an Fc domain of an immunoglobulin. In some cases, the immune enhancing protein may be secreted, and thus is operably linked to a secretory signal sequence. In some cases, the LAMP-antigen fusion protein may have the backbone structure of any one of ILC-1, ILC-2, ILC-3, ILC-4, ILC-5 or ILC-6 of FIG. 1 herein. In some cases, it has the backbone structure of ILC-4. In some cases, the LAMP-antigen construct comprises the antigen placed between two homology domains of a luminal domain of a LAMP protein. In other cases, the antigen is placed at the before the N-terminus of a LAMP homology domain or after the C-terminus of a LAMP homology domain but prior to a LAMP transmembrane domain. As used herein, the LAMP protein can be selected from LAMP-1, LAMP2, LAMP-3, LIMP 2, Macrosialin, Endolyn, LAMP5 or LIMBIC. In additional embodiments, the LAMP protein is selected from an amino acid sequence having at least 60%, at least 70%, at least 75%, at least 80%, at least 85%, at least 90%, at least 95%, at least 96%, at least 97%, at least 98%, at least 99%, or 100% sequence identity to any one of the amino acid SEQ ID NOS: 1-113. In some cases, the LAMP protein is LAMP-1.

[0317] In some cases, the LAMP components include, in addition to at least two homology domains of LAMP, a transmembrane domain of LAMP or of a heterologous protein, as well as optionally a signal sequence of LAMP or a heterologous protein, and in some cases a cytoplasmic domain of LAMP. In some such cases, the LAMP protein is LAMP-1.

[0318] In particular, LAMP-1, as deduced from a cDNA clone (Chen, et al., J. Biol. Chem. 263:8754, 1988) consists of a polypeptide core of about 382 amino acids with a large (346-residue) luminal amino-terminal domain followed by a 24-residue hydrophobic transmembrane region and short (12-residue) carboxyl-terminal cytoplasmic tail. See, FIG. 2A and FIG. 2B. The luminal domain is highly glycosylated, being substituted with about 20 asparagine linked complex-type oligosaccharides and consists of two approximately 160-residue “homology domains” that are separated by a proline/serine-rich 22-residue “hinge” region. Each of these “homology domains” contains 4 uniformly spaced cysteine residues, disulfide bonded to form four 36-38-residue loops symmetrically placed within the two halves of the luminal domain (Arterburn, et al., J. Biol. Chem. 265:7419, 1990; see, also Chen, et al., J. Biol. Chem. 25: 263 (18): 8754-8, 1988). FIG. 2A schematically shows the conserved domains between LAMP-1, LAMP-2, LAMP-3, Endolyn, LIMBIC, LAMP5, or Macrosialin.

[0319] Previously reported LAMP constructs comprised the following elements in this specific arrangement: (a) a full luminal domain of LAMP-1 protein, the antigen and then the full transmembrane/cytoplasmic tail of LAMP-1 protein; or (b) the antigen and the full transmembrane/cytoplasmic tail of a LAMP-1 protein.

[0320] In example (a), the antigenic sequence is inserted in between the full luminal domain of a LAMP-1 protein and the LAMP-1 full transmembrane domain/cytoplasmic tail. Both constructs have been shown to successfully target an antigenic sequence to the lysosome/endosome and will be referred to as “complete LAMP Constructs” as shown in FIG. 1 as compared to the improved LAMP Constructs ILC-1-ILC-6 described herein. The bicistronic LAMP constructs described herein do not include the complete LAMP Constructs. Instead, the bicistronic LAMP constructs described herein may comprise at least one antigen fused to the N-terminus of the luminal domain of a LAMP protein, the N- or C-terminus of at least one homology domain of a LAMP protein, or the N- or C-terminus of at least one Cysteine Conserved Fragment of a LAMP protein (see, for example ILC-1-ILC-6 of FIG. 1). However, some bicistronic LAMP constructs comprise at least one antigen fused between a first homology domain of a LAMP protein and a second homology domain of a LAMP protein (or at least between two Cysteine Conserved Fragments) (see, for example, ILC-4 of FIG. 1). For example, the at least one antigen may be placed in, or may replace, the LAMP hinge region. In some embodiments, this construct also comprises a transmembrane domain of a LAMP protein, and/or the cytosolic tail of a LAMP protein.

[0321] Specifically, in some embodiments, the bicistronic LAMP constructs comprise two homology domains (e.g., ILC-4 of FIG. 1). In some embodiments, these constructs also comprise a transmembrane domain of a LAMP protein, and/or the cytosolic tail of a LAMP protein. In other embodiments, when an antigen contains a transmembrane domain, the transmembrane domain of a LAMP protein and/or the cytosolic tail of a LAMP protein is unnecessary. In further other embodiments, the two homology domains are derived from a LAMP-1, LAMP-2, LAMP-3, or an Endolyn protein. Alternatively, the two homology domains are derived from different LAMP proteins. In these constructs comprising two homology domains, a LAMP hinge domain may also be included.

[0322] In cases in which the LAMP-antigen portion of the bicistronic LAMP construct comprises an ILC-4 structure (as shown in FIG. 1), such as wherein the first polynucleotide sequence of the LAMP construct comprises or encodes a polypeptide comprising two homology domains of a luminal domain of a LAMP protein, and an antigenic domain heterologous to the LAMP protein, wherein the antigenic domain is placed between the two homology domains, the two LAMP protein homology domains may be chosen from the homology domain 1 and homology domain 2 amino acid sequences as shown in FIG. 3, derived from SEQ ID NOs: 1-113, or amino acid sequences that are at least 90%, at least 95%, at least 96%, at least 97%, at least 98% or at least 99% identical to those sequences, for example. Thus, for example, where the LAMP in such a construct is LAMP-1, a native human LAMP-1 homology domain 1 and homology domain 2 may surround the antigenic domain of the LAMP-antigen construct. In some cases, the homology domains may comprise amino acid residues 29-194 and 228-381 of SEQ ID NO: 1, or amino acid sequences that are at least 90%, at least 95%, at least 96%, at least 97%, at least 98% or at least 99% identical to those sequences, or one of the sequences of such domains depicted in FIGS. 2A and 3, or residues 29-195 of SEQ ID NOs: 198 and 202, for example. Where the construct is a polynucleotide, the construct may further encode a signal sequence prior to the start of the LAMP homology domain 1 coding sequence, for example residues 1-28 of SEQ ID NO: 1 or the signal sequences depicted otherwise in FIG. 2A and FIG. 3, or for example residues 1-28 of SEQ ID NO: 198. In some cases, a heterologous (i.e. non-LAMP) signal sequence may also be used. Therefore, in some embodiments, the first homology domain of LAMP comprises a polypeptide sequence with at least 90%, at least 95%, at least 96%, at least 97%, at least 98%, at least 99%, or with 100% sequence identity of residues 29 to the C-terminal of SEQ ID NO: 198 or residues 29-194 of SEQ ID NO: 1. In some cases, a LAMP signal sequence such as residues 1-28 of SEQ NO: 198 or SEQ ID NO: 1 may also be included. In some cases, the second homology domain of LAMP comprises a polypeptide sequence with at least 90%, at least 95%, at least 96%, at least 97%, at least 98%, at least 99%, or with 100% sequence identity of SEQ ID NO: 202 or residues 228-381 of SEQ ID NO: 1. In some cases, a LAMP transmembrane domain may be included, such as depicted in FIGS. 2A and 3, i.e., comprising residues 383-405 of SEQ ID NO:1, or comprising another native LAMP transmembrane domain sequence. In some cases, a cytoplasmic tail of LAMP may also be included, such as comprising residues 406-417 of SEQ ID NO: 1, or as depicted in FIGS. 2A and 3, or otherwise comprising a native LAMP cytoplasmic tail sequence.

[0323] In some other embodiments, the bicistronic LAMP constructs comprise at least one antigen fused to the C-terminus of a single homology domain of a LAMP protein or a single Cysteine Conserved Fragment of a LAMP protein. See, for example, ILC-3 and ILC-5 of FIG. 1. In some embodiments, these constructs also comprise a transmembrane domain of a LAMP protein, and/or the cytosolic tail of a LAMP protein. In other embodiments, when an antigen contains a transmembrane domain, the transmembrane domain of a LAMP protein and/or the cytosolic tail of a LAMP protein is unnecessary.

[0324] The bicistronic LAMP constructs described above can be generated using the domains defined in the Figures. For example, it is specifically contemplated that the domains included in the bicistronic LAMP constructs illustrated in FIG. 1, for example, can originate from sequences derived from orthologous sequences. See, FIGS. 3-10 for example. It is expressly contemplated that the equivalent domains defined in FIG. 2A and FIG. 2B be used to generate the bicistronic LAMP constructs using the vector backbones illustrated in FIG. 1 for orthologous sequences.

[0325] Moreover, the orthologous sequences shown in FIGS. 3-10 are representative of the sequences that can be used to generate the domains. It is well within the skill in the art to identify other orthologous sequences and/or isotypes and comparing them to the alignments shown in FIGS. 3-10. Thus, by identifying the equivalent boundaries defined in FIG. 2A and FIG. 2B for a human LAMP protein with the alignments shown in FIGS. 3-10, one can generate the bicistronic LAMP constructs described herein.

[0326] As would be well understood by the skilled artisan, the boundaries of each domain are an approximation and may be adjusted at least 1, 2, 3, 4, 5, 6, 7, 8, 9, or 10 amino acids based on cloning considerations and restriction enzyme placement. Therefore, when a particular domain (e.g., a LAMP Homology Domain) is included in the bicistronic LAMP construct, the amino acids beginning and ending of the domain may be adjust by at least 1, 2, 3, 4, 5, 6, 7, 8, 9, or 10 amino acids as those boundaries defined in FIG. 2A.

[0327] Each of the bicistronic LAMP constructs described herein can additionally comprise a signal sequence and/or additional amino acids in between each domain for cloning purposes as is well known in the art. Additionally, the LAMP homologous domains, the LAMP luminal domain, the LAMP transmembrane domain, and/or the LAMP cytosolic tail domain can originate from the same LAMP protein (e.g., human LAMP-1) or different LAMP proteins (e.g., luminal domain from human LAMP-1 and transmembrane domain from human LAMP-2, and/or mixing of orthologous domains in the same gene family (e.g., LAMP-1) or different gene family (LAMP-1 and LAMP-2).

[0328] Polypeptide variants of the described LAMP Constructs are contemplated. For example, polypeptides at least 60%, at least 70%, at least 75%, at least 80%, at least 85%, at least 90%, at least 95%, at least 96%, at least 97%, at least 98% or at least 99% identity to any of the bicistronic LAMP constructs described herein as well as polynucleotides encoding these variants. Variants of the bicistronic LAMP constructs retain the ability to function by targeting the antigenic sequence to the lysosome. For example, a modified luminal sequence must retain the ability to traffic both membrane and non-membrane antigenic materials to an endosomal compartment with at least 50%, at least 60%, at least 70%, at least 80%, at least 90%, or 100% efficacy compared to the original domain sequence, i.e., an efficacy that results in sufficient antigen presentation by a cell comprising the chimeric sequence for it to mount an immune response. In one aspect, sequences containing a suitable trafficking signal may be identified by constructing a bicistronic LAMP construct containing the well-characterized antigenic domain of ovalbumin, a transmembrane domain, and the cytoplasmic domain of a protein containing a putative lysosomal/endosomal targeting signal. Efficiency of targeting can be measured by determining the ability of antigen presenting cells, expressing the bicistronic LAMP construct, to stimulate HA epitope-specific, MHC class II restricted T-cells (see, e.g., Example 5 of U.S. Pat. No. 5,633,234).

[0329] Polynucleotides encoding any of the described bicistronic LAMP constructs are some embodiments of the disclosure, along with polynucleotides at least 60%, at least 70%, at least 75%, at least 80%, at least 85%, at least 90%, at least 95%, 96%, 97%, 98% or 99% identity to any of the bicistronic LAMP construct polynucleotides described herein. Variants of the bicistronic LAMP constructs retain the ability to function by targeting the antigenic sequence to the lysosome. For example, a modified luminal sequence must retain the ability to traffic both membrane and non-membrane antigenic materials to an endosomal compartment with at least 50%, at least 60%, at least 70%, at least 80%, at least 90%, or at least 100% efficacy compared to the original domain sequence, i.e., an efficacy that results in sufficient antigen presentation by a cell comprising the chimeric sequence for it to mount an immune response. In one aspect, sequences containing a suitable trafficking signal may be identified by constructing a bicistronic LAMP construct containing the well-characterized antigenic domain of ovalbumin, a transmembrane domain, and the cytoplasmic domain of a protein containing a putative lysosomal/endosomal targeting signal. Efficiency of targeting can be measured by determining the ability of antigen presenting cells, expressing the bicistronic LAMP construct, to stimulate HA epitope-specific, MHC class II restricted T-cells (see, e.g., Example 5 of U.S. Pat. No. 5,633,234).

### C. Construction of Exemplary Bicistronic LAMP Constructs

[0330] Bicistronic LAMP constructs herein may be constructed, for example, from an isolated nucleotide sequence in which the promoter/enhancer and coding sequences for the LAMP-antigen construct are followed or preceded in the nucleic acid by a second promoter/enhancer and coding sequences for a second polypeptide. In some cases, the second polypeptide may be a polypeptide intended to enhance an immune response, i.e., a protein or extracellular domain of a protein expressed from an immune response enhancing gene (IREG). In some cases, the second polypeptide may be secreted, and thus the nucleotide may include an appropriate secretory signal sequence for the second polypeptide, which may be already included in the polypeptide coding sequence, or which may be from a different protein. In some cases the second polypeptide is a fusion protein, such as an extracellular domain or complete IREG polypeptide fused to another polypeptide sequence such as an Fc domain of an immunoglobulin, a further antigen, or the like.

[0331] As described below, the antigen in the LAMP-antigen construct used in the bicistronic LAMP constructs may be a target antigen for an infectious disease such as a viral spike protein, or it could alternatively be a cancer antigen such as a polypeptide overexpressed in certain tumors or tumor cells.

[0332] For example, as described in the Examples below, certain bicistronic LAMP proteins were made using a spike protein or spike protein subunit from a SARS Co-V2 virus as well as using a cancer antigen such as a HER2 extracellular domain, or using NY-ESO1 or CD161. Thus, in some embodiments, the LAMP-antigen construct comprises LAMP fused to a cancer antigen or viral spike protein antigen. Coding regions for such antigens may, in some cases, be combined with an IREG coding region. Examples of IREGs include certain cytokines or immune proteins, such as CD40L, CD80, OX40, Flt3L, GM-CSF, IL-12, IL-21, IL-23, IL-15, CD70, CD86, IL-7, IL-18, or IL-33. In some embodiments, the IREG comprises a homologous or heterologous secretory signal sequence coding region so that the second polypeptide is secreted when expressed.

[0333] As described in the Examples that follow, the following bicistronic LAMP constructs were constructed: (1) HER2-LAMP-sCD40L (FIG. 11; SEQ ID NO: 197), (2) HER2-LAMP-mFLT3L (SEQ ID NO: 208), (3) HER2-LAMP-IL-12 (SEQ ID NO: 212), (4) HER2-LAMP-IL-21 (SEQ ID NO: 216), (5) HER2-LAMP-OX40L (SEQ ID NO: 241), (6) HER2-LAMP-CD80 (SEQ ID NO: 251), (7) NY-ESO1-LAMP-IL-15 (SEQ ID NO: 222), (8) CD161-LAMP-sCD40L (SEQ ID NO: 235), (9) Spike-LAMP-sCD40L (2-V Covid vaccine; SEQ ID NO: 230), and (10) ITI-COVID-19 bicistronic vaccine (ITI-Bicistronic-S1-LAMP-RBG pA-EF2-S2P BHG pA; first generation COVID-19 vaccine; SEQ ID NO: 228). Sequences for these constructs and their components are provided in the table below.

[0334] For example, a viral vector can be constructed comprising a first polynucleotide sequence to generate the different structures ILC-1 to ILC-6 shown in FIG. 1, including the structure of ILC-4 that was present in some embodiments or similar structures comprising a first antigen of interest (a priming antigen) in, or replacing, the LAMP hinge region between first and second homology domains of a LAMP protein (or at least between two Cysteine Conserved Fragments). The LAMP domains illustrated in FIG. 1 were derived from the amino acid sequences shown in FIGS. 3-10. Corresponding domains can also be cloned from the orthologous sequences by identifying the equivalent domains when compared to the human sequence. An antigen of interest (including one or more antigens of interest) can be cloned into the described LAMP construct either individually or in combination. The viral vector can also be constructed to encode an expression cassette comprising the second polynucleotide sequence encoding an IREG or a second antigen, which may be operably linked to a secretion signal sequence.

[0335] The relatively “compact” size of the ILC-4 LAMP construct is advantageous in some embodiments inasmuch as it may reduce size constraints associated with including a second polynucleotide sequence. Moreover, as described in the abovementioned U.S. Pat. No. 11,203,629, ILC-4 LAMP constructs have been found to provide stronger immune responses (e.g., stronger T-cell and/or antibody responses) than other LAMP constructs tested. Thus, in some embodiments, the bicistronic LAMP construct is uses an ILC-4 design, i.g., comprises an ILC-4 LAMP-antigen construct general structure.

[0336] In some embodiments, an isolated nucleic acid, e.g. a vector or vaccine, comprising expression cassettes, that encodes the bicistronic LAMP construct is a DNA vector, while in other cases it is an RNA vector, including a self-amplifying RNA vector.

### D. Antigens for Use in Bicistronic LAMP Constructs

### 1. SARS-COV-2 Viral Antigens and Bicistronic Constructs

[0337] In some embodiments, the antigen in a LAMP-antigen construct may comprise an antigen from a SARS COV2 or other viral infectious agent, such as a viral spike protein. In some cases, a bicistronic construct may also express a second antigen from the same infectious agent for secretion. In other cases, the bicistronic construct may express an IREG polypeptide as a second polypeptide.

[0338] In one particular example, a first generation vector was constructed for use as a vaccine against the severe acute respiratory syndrome coronavirus (SARS-COV-2 virus, otherwise known as COVID-19). Except for generation neutralizing antibodies by an effective vaccine, T cells are an important component of naturally acquired protective immunity to many infectious diseases, many vaccines and vaccines in-development against viral infections are often to elicit virus-specific T cell responses that have the potential to activate innate immunity, have direct effector functions, as well as help the antibody responses, which can be used as preventive and therapeutic propose.

[0339] In order to induce both T cell and antibody responses to prevent the infection of SARS-Cov-2 or reduce symptoms associated with infection, a vector was designed, in which two viral proteins were expressed separately. The first fusion protein composed of LAMP and viral spike S1 subunit protein aimed to elicit rapid and robust S1-specific CD4+ T cell responses. The second protein was full-length spike protein with two proline substitution, which was driven by an independent promoter Human elongation factor-1 alpha (EF1) and also had a sequence peptide (IgK SP) on its N-terminus.54nub design enabled the generation of prefusion-stabilized spike protein and its secretion to present the antigens to B cells. The robust S1-specific CD4 T cells elicited by first promoter helped not only the function of CD8 T cell but also potentiated the neutralizing antibodies to SARS-Cov-2. (See FIGS. 28A-C for description of the vector.)

[0340] The first generation ITI-COVID-19 bicistronic vaccine encodes for the expression of the S1 and S2 subunits of the virus surface-anchored spike glycoprotein. The S1 and S2 subunits of spike mediate entry of the SARS-COV-2 virus into a host cell. Using a nucleic acid molecule for an ILC-4 LAMP construct, the S1 coding sequence (GenBank MN908974) was located between the polynucleotide sequences encoding two LAMP homology domains (N-Lamp and Luminal domain 2). The S1 coding sequence was operably linked to a CMV promoter under the influence of a CMV enhancer sequence, so that expression in a host cell resulted in an ILC-4 LAMP construct comprising the S1 antigen for processing and presentation to MHC class II molecules (i.e., to provide the “priming antigen”). The S2 coding sequence was provided elsewhere on the vector and was operably linked to a polynucleotide sequence encoding an Ig-kappa secretion signal (leader sequence) and an EF1 promoter sequence, so that expression in a host cell resulted in an S2 antigen for secretion (i.e., to provide the “boosting antigen”). The vector thereby provided a single nucleic acid molecule for introduction into a suitable host or target cell capable of providing both priming and boosting antigens to elicit an enhanced immune response. This may therefore confer a significant advantage over the use of a vector which only encodes a bicistronic LAMP construct inasmuch as any desire or requirement to enhance the immune response elicited by the LAMP construct will require the administration of a separately administered booster vaccine (e.g., comprising the antigen) at one or more time intervals.

[0341] A second generation COVID-19 vector, Spike-LAMP-sCD40L, was later designed and tested, as described in Examples 1 and 2 below, and was found to have unexpectedly even higher immune response to the first generation vector. This second generation vector encodes a LAMP-antigen sequence as provided in SEQ ID NO: 229 in an ILC-4 format, in which the particular Spike was derived from the B1.351 variant. It is to be understood that, as COVID-19 evolves further, other variant Spike antigens could be used to replace the one used for this vector. And, instead of a second COVID-19 antigen as a second polypeptide, this second generation vector encodes a fusion protein of lung surfactant binding protein D (SPD) and CD40L extracellular domain, as provided in SEQ ID NO: 233.

[0342] It is to be understood that variants of such isolated nucleic acids are encompassed herein, in which the LAMP-antigen construct comprises a COVID-19 Spike protein or similar viral antigen protein and an IREG polypeptide, such as an SPD-CD40L or an extracellular domain or complete protein sequence of another IREG such as CD80, OX40, Flt3L, GM-CSF, IL-12, IL-21, IL-23, IL-15, CD70, CD86, IL-7, IL-18, or IL-33, which can in some cases optionally be further fused to a domain such as an immunoglobulin Fc domain. Linkers may also be present between the domains of the first or second polypeptide in some embodiments. And in some embodiments, the second polypeptide may be secreted, and thus operably linked to a secretory signal sequence.

### a) Exemplary Spike Protein Sequences

[0343] In some embodiments, a LAMP-antigen construct may comprise an infectious disease antigen, such as a bacterial or viral antigen. In some embodiments, the viral antigen is a spike protein or domain of a spike protein. In some cases, the viral antigen is derived from a coronavirus, such as a SARS virus, such as SARS-COV-2 (COVID-19) virus. In some embodiments, an antigen used in a bicistronic construct herein is selected from antigens encoded by the SARS-COV-2 virus, such as the S1 spike subunit or S2 spike subunit. Examples of such S1 spike subunit include, but are not limited to an amino acid sequence at least 60%, at least 70%, at least 75%, at least 80%, at least 85%, at least 90%, at least 95%, at least 96%, at least 97%, at least 98%, at least 99%, or 100% sequence identity of SEQ ID NO: 118 and/or an amino acid sequence at least 60%, at least 70%, at least 75%, at least 80%, at least 85%, at least 90%, at least 95%, at least 96%, at least 97%, at least 98%, at least 99%, or 100% sequence identity of SEQ ID NO: 119 or SEQ ID NO: 231. In some embodiments, the bicistronic construct comprises a polynucleotide encoding an amino acid sequence at least 60%, at least 70%, at least 75%, at least 80%, at least 85%, at least 90%, at least 95%, at least 96%, at least 97%, at least 98%, or at least 99% sequence identity of SEQ ID NO: 229. In some embodiments, the bicistronic construct comprises a polynucleotide comprising at least 60%, at least 70%, at least 75%, at least 80%, at least 85%, at least 90%, at least 95%, at least 96%, at least 97%, at least 98%, or at least 99% sequence identity of SEQ ID NO: 232.

[0344] In some cases, the corresponding second polypeptide expressed by the bicistronic construct is an IREG polypeptide, such as an SPD-CD40L or an extracellular domain or complete protein sequence of another IREG such as CD80, OX40, Flt3L, GM-CSF, IL-12, IL-21, IL-23, IL-15, CD70, CD86, IL-7, IL-18, or IL-33, which can in some cases optionally be further fused to a domain such as an immunoglobulin Fc domain.

### 2. Cancer-Related Antigens

[0345] In other embodiments, the LAMP-antigen construct may comprise a cancer antigen. Candidates for cancer immunotherapy, using the vaccines comprising the bicistronic LAMP construct described herein, would be any patient with a cancer such as, for example, patients with documented Epstein-Barr virus associated lymphomas, patients with HPV associated cervical carcinomas, patients with chronic HCV, or patients with a defined re-arrangement or mutation in an oncogene or tumor suppressor gene.

[0346] In some embodiments, cancers that can be treated using the vaccines comprising the bicistronic LAMP construct described herein include, but are not limited to all stages of progression, including hyperplasia of an adenocarcinoma, sarcoma, skin cancer, melanoma, Merkel cell carcinoma, bladder cancer, brain cancer, breast cancer, uterine cancer, ovarian cancer, prostate cancer, lung cancer (including, but not limited to NSCLC, SCLC, squamous cell cancer), colorectal cancer, anal cancer, rectal cancer, cervical cancer, liver cancer, head and neck cancer, oral cancer, salivary gland cancer, esophageal cancer, pancreatic (pancreas) cancer, pancreatic ductal adenocarcinoma (PDA), renal cancer, stomach cancer, kidney cancer, multiple myeloma or cerebral cancer.

[0347] It is envisioned that therapy with a vaccine composition comprising a nucleic acid molecule as described herein could be utilized at any period during the course of the individual's cancer, once it is identified. It is also possible that in high-risk patients, vaccination in order to prevent the subsequent emergence of a cancer.

[0348] Examples of such cancer antigens include HER2, CD161, and NY-ESO1, or their extracellular domains.

### a) HER2

[0349] In some embodiments, a LAMP-antigen construct comprises a HER2 antigen. In some cases, the HER2 antigen comprises an extracellular domain (ECD) portion of HER2. In some cases, the antigen is selected from an amino acid sequence at least 60%, at least 70%, at least 75%, at least 80%, at least 85%, at least 90%, at least 95%, at least 96%, at least 97%, at least 98%, at least 99%, or with 100% sequence identity of SEQ ID NO: 200. In some embodiments, the HER2 antigen coding nucleotide sequence has at least 60%, at least 70%, at least 75%, at least 80%, at least 85%, at least 90%, at least 95%, at least 96%, at least 97%, at least 98%, or at least 99% sequence identity of SEQ ID NO: 201.

[0350] In some embodiments, a HER2-LAMP-antigen construct encodes an amino acid sequence at least 60%, at least 70%, at least 75%, at least 80%, at least 85%, at least 90%, at least 95%, at least 96%, at least 97%, at least 98%, at least 99%, or with 100% sequence identity of SEQ ID NO: 195. In some embodiments, a LAMP-antigen construct encodes a HER2-LAMP and comprises a nucleotide sequence at least 60%, at least 70%, at least 75%, at least 80%, at least 85%, at least 90%, at least 95%, at least 96%, at least 97%, at least 98%, at least 99%, or with 100% sequence identity of SEQ ID NO: 196. In some embodiments, the HER2-LAMP antigen construct has a nucleotide coding sequence at least 60%, at least 70%, at least 75%, at least 80%, at least 85%, at least 90%, at least 95%, at least 96%, at least 97%, at least 98%, at least 99%, or with 100% sequence identity of SEQ ID NO: 199 followed by SEQ ID NO: 201 followed by SEQ ID NO: 203. In some embodiments, the HER2-LAMP antigen construct has a polypeptide sequence at least 60%, at least 70%, at least 75%, at least 80%, at least 85%, at least 90%, at least 95%, at least 96%, at least 97%, at least 98%, at least 99%, or with 100% sequence identity of SEQ ID NO: 198 followed by SEQ ID NO: 200 followed by SEQ ID NO: 202, optionally with one or two linker sequences between these segments.

[0351] In some cases, the corresponding second polypeptide expressed by the bicistronic construct is an IREG polypeptide, such as an SPD-CD40L or an extracellular domain or complete protein sequence of another IREG such as CD80, OX40, Flt3L, GM-CSF, IL-12, IL-21, IL-23, IL-15, CD70, CD86, IL-7, IL-18, or IL-33, which can in some cases optionally be further fused to a domain such as an immunoglobulin Fc domain.

### b) NY-ESO1

[0352] In some embodiments, the LAMP-antigen construct comprises an antigen of NY-ESO1. Examples of such NY-ESO1 antigen sequences include, but are not limited to an amino acid sequence at least 60%, at least 70%, at least 75%, at least 80%, at least 85%, at least 90%, at least 95%, at least 96%, at least 97%, at least 98%, at least 99%, or 100% sequence identity of SEQ ID NO: 223. In some embodiments, the NY-ESO1 nucleotide coding sequence is at least 60%, at least 70%, at least 75%, at least 80%, at least 85%, at least 90%, at least 95%, at least 96%, at least 97%, at least 98%, at least 99%, or 100% sequence identity of SEQ ID NO: 224.

[0353] In some embodiments, the LAMP-antigen construct comprises: (a) a polynucleotide encoding an amino acid sequence at least 60%, at least 70%, at least 75%, at least 80%, at least 85%, at least 90%, at least 95%, at least 96%, at least 97%, at least 98%, or at least 99% sequence identity of SEQ ID NO: 221. In some embodiments, the LAMP-antigen construct coding sequence is at least 60%, at least 70%, at least 75%, at least 80%, at least 85%, at least 90%, at least 95%, at least 96%, at least 97%, at least 98%, at least 99%, or with 100% sequence identity of SEQ ID NO: 199 followed by SEQ ID NO: 224 followed by SEQ ID NO: 203.

[0354] In some cases, the corresponding second polypeptide expressed by the bicistronic construct is an IREG polypeptide, such as an IL-15 or an extracellular domain or complete protein sequence of another IREG such as CD40, CD80, OX40, Flt3L, GM-CSF, IL-12, IL-21, IL-23, CD70, CD86, IL-7, IL-18, or IL-33, which can in some cases optionally be further fused to a domain such as an immunoglobulin Fc domain.

### c) CD161

[0355] In some embodiments, the LAMP-antigen construct includes an antigen of CD161, such as an ECD of CD161. Examples of such CD161 sequences include, but are not limited to an amino acid sequence at least 60%, at least 70%, at least 75%, at least 80%, at least 85%, at least 90%, at least 95%, at least 96%, at least 97%, at least 98%, at least 99%, or 100% sequence identity of SEQ ID NO: 236. In some embodiments, a CD161 ECD nucleotide coding sequence is at least 60%, at least 70%, at least 75%, at least 80%, at least 85%, at least 90%, at least 95%, at least 96%, at least 97%, at least 98%, at least 99%, or 100% sequence identity of SEQ ID NO: 237.

[0356] In some embodiments, the LAMP-antigen construct comprises: (a) a polynucleotide encoding an amino acid sequence at least 60%, at least 70%, at least 75%, at least 80%, at least 85%, at least 90%, at least 95%, at least 96%, at least 97%, at least 98%, or at least 99% sequence identity of SEQ ID NO: 234. In some embodiments, the LAMP-antigen construct coding sequence is at least 60%, at least 70%, at least 75%, at least 80%, at least 85%, at least 90%, at least 95%, at least 96%, at least 97%, at least 98%, at least 99%, or with 100% sequence identity of SEQ ID NO: 199 followed by SEQ ID NO: 237 followed by SEQ ID NO: 203.

[0357] In some cases, the corresponding second polypeptide expressed by the bicistronic construct is an IREG polypeptide, such as an SPD-CD40L or an extracellular domain or complete protein sequence of another IREG such as CD80, OX40, Flt3L, GM-CSF, IL-12, IL-21, IL-23, IL-15, CD70, CD86, IL-7, IL-18, or IL-33, which can in some cases optionally be further fused to a domain such as an immunoglobulin Fc domain.

### Additional Cancer Antigens

[0358] The following antigens shown in Table A can also be cloned into each of the bicistronic LAMP-antigen constructs described herein using techniques known to the skilled artisan. The sequences/fragments/epitopes described in the fourth column, for example, can be also cloned into the LAMP-antigen constructs as described herein. Moreover, any one of the cancer antigens listed in Table A can be combined with any other antigen listed in Table A including the sequences/fragments/epitopes described in the fourth column) and inserted into the LAMP-antigen constructs as described herein. Or any one of the cancer antigens of Table A can be combined with any other cancer antigen described in the instant disclosure and inserted into the LAMP-antigen constructs herein.

[0359] In some cases, the corresponding second polypeptide expressed by the bicistronic construct that includes a cancer antigen from Table A is an IREG polypeptide, such as an SPD-CD40L or an extracellular domain or complete protein sequence of another IREG such as CD80, OX40, Flt3L, GM-CSF, IL-12, IL-21, IL-23, IL-15, CD70, CD86, IL-7, IL-18, or IL-33, which can in some cases optionally be further fused to a domain such as an immunoglobulin Fc domain.

| SEQ | | | |
|---|---|---|---|
| ID | Protein Name | Accession/ | Exemplary Epitopes/Fragments that can be cloned into the LAMP |
| NO: | of Antigen | Derived From | Constructs described herein, comprise at least: . . |
| 254 | Large T antigen | YP_009111421 | Amino acids 1-327 of SEQ ID NO: 254, with or without mutations at amino acid |
| | | | 220, wherein the wild type serine is preferably replaced with an alanine (or other |
| | | | inactivating amino acid) (e.g., SEQ ID NO: 255-256) so that phosphorylation of the |
| | | | Rb binding motif is inhibited as described in Sharma et al. 38, 1153-1162 (IJC |
| | | | 2016). Fragments of amino acids 1-327 of SEQ ID NO: 254 are also contemplated, |
| | | | such as those exemplified as SEQ ID NO: 255-256, so long as these fragments |
| | | | retain the ability to raise an antibody response to the Large T Antigen of Merkel cell |
| | | | polyomavirus (MCPγV). |
| | | | One example of a Large T antigen LAMP construct that may be used with a |
| | | | bicistronic construct herein is a construct of SEQ ID NO: 879 or 880. |
| 255 | Large T antigen | YP_009111421 | Amino acids 1-327 of SEQ ID NO: 254 wherein S220 is any amino acid (X) |
| 256 | Large T antigen | YP_009111421 | Amino acids 1-327 of SEQ ID NO: 254 wherein S220 is alanine (A) |
| 257 | Small T antigen | YP_009111422 | MCPyVgp4 small T antigen, full length and fragments. |
| 258 | MAGE-A10 | UniProtKB: A0A024RC14 | |
| 259 | MAGE-A12 | UniProtKB: P43365 | |
| 260 | MAGE-A1 | UniProtKB: P43355 | |
| 261 | MAGE-A2 | UniProtKB: P43356 | |
| 262 | MAGE-A3 | UniProtKB: P43357 | |
| 263 | MAGE-A4 | UniProtKB: A0A024RC12 | |
| 264 | MAGE-A4 | UniProtKB: P43358 | |
| 265 | MAGE-A4 | UniProtKB: Q1RN33 | |
| 266 | MAGE-A6 | UniProtKB: A8K072 | |
| 267 | MAGE-A6 | UniProtKB: P43360 | |
| 268 | MAGE-A6 | UniProtKB: Q6FHI5 | |
| 269 | MAGE-A9 | UniProtKB: P43362 | |
| 270 | MAGE-B10 | UniProtKB: Q96LZ2 | |
| 271 | MAGE-B16 | UniProtKB: A2A368 | |
| 272 | MAGE-B17 | UniProtKB: A8MXT2 | |
| 273 | MAGE-_B1 | UniProtKB: Q96TG1 | |
| 274 | MAGE-B2 | UniProtKB: O15479 | |
| 275 | MAGE-B3 | UniProtKB: O15480 | |
| 276 | MAGE-B4 | UniProtKB: O15481 | |
| 277 | MAGE-B5 | UniProtKB: Q9BZ81 | |
| 278 | MAGE-B6 | UniProtKB: Q8N7X4 | |
| 279 | MAGE-C1 | UniProtKB: O60732 | |
| 280 | MAGE-C2 | UniProtKB: Q9UBF1 | |
| 281 | MAGE-C3 | UniProtKB: Q8TD91 | |
| 282 | MAGE-D1 | UniProtKB: Q9Y5V3 | |
| 283 | MAGE-D2 | UniProtKB: Q9UNF1 | |
| 284 | MAGE-D4 | UniProtKB: Q96JG8 | |
| 285 | MAGE-_E1 | UniProtKB: Q6IAI7 | |
| 286 | MAGE- | UniProtKB: Q9HCI5 | |
| | E1_(MAGE1) | | |
| 287 | MAGE-E2 | UniProtKB: Q8TD90 | |
| 288 | MAGE-F1 | UniProtKB: Q9HAY2 | |
| 289 | MAGE-H1 | UniProtKB: Q9H213 | |
| 290 | MAGEL2 | UniProtKB: Q9UJ55 | |
| 291-293 | pp65 | ABQ23593 | Exemplary pp65 antigen sequences useful in pp65-LAMP constructs herein also |
| | | | include those comprising: LLQTGIHVRVSQPSL (SEQ ID NO: 291, pos 41-55) |
| | | | and/or ALPLKMLNIPSINVH (SEQ ID NO: 291, pos 115-129) and/or |
| | | | DQYVKVYLESFCEDV (SEQ ID NO: 291, pos 221-235) and/or |
| | | | IIKPGKISHIMLDVAFTSH (SEQ ID NO: 291, pos 281-299) and/or |
| | | | PQYSEHPTFTSQYRIQGKL (SEQ ID NO: 291, pos 361-379) and/or |
| | | | PPWQAGILARNLVPMV (SEQ ID NO: 291, pos 485-500) and/or |
| | | | KYQEFFWDANDIYRIFA (SEQ ID NO: 291, pos 509-525), wherein each |
| | | | epitope can be combined in any order and/or in any combination and cloned into a |
| | | | LAMP Construct described herein, wherein each epitope is optionally separated by |
| | | | a linker, such as, for example GPGPG (SEQ ID NO: 292, pos 36-40) or PMGLP |
| | | | (SEQ ID NO: 293, pos 36-40). Representative construct inserts are shown as SEQ |
| | | | ID NO: 292 and SEQ ID NO: 293 |
| 294-297 | gB | P06473 | Exemplary gB antigen sequences herein also include those comprising: |
| | | | TTSAQTRSVYSQHVT (SEQ ID NO: 294, pos 44-58) and/or |
| | | | QLIPDDYSNTHSTRYV (SEQ ID NO: 294, pos 212-227) and/or |
| | | | VSVFETSGGLVVFWQ (SEQ ID NO: 294, pos 418-432) and/or |
| | | | NSAYEYVDYLFKRMIDLS (SEQ ID NO: 294, pos 622-639), wherein each |
| | | | epitope can be combined in any order and/or in any combination and cloned into a |
| | | | LAMP Construct described herein, wherein each epitope is preferably separated by |
| | | | a linker, such as, for example GPGPG (SEQ ID NO: 296, pos 16-20) or PMGLP |
| | | | (SEQ ID NO: 297, pos 16-20). Representative construct inserts are shown as SEQ |
| | | | ID NO: 296 and SEQ ID NO: 297. |
| 298-300 | IE1 | P13202 | Exemplary 1E1 antigen sequences also include those comprising: |
| | | | VLAELVKQIKVRVDMVRHRIKEHMLKKYTQ (SEQ ID NO: 298, pos 81- |
| | | | 110) and/or IVPEDKREMWMACIKELH (SEQ ID NO: 298, pos 158-175) |
| | | | and/or KDELRRKMMYMCYRNIEFFTKNSAFPKTT (SEQ ID NO: 298, pos |
| | | | 197-225) and/or SVMKRRIEEICMKVFAQYI (SEQ ID NO: 298, pos 337-355) |
| | | | and/or AIAEESDEEEAIVAY (SEQ ID NO: 298, pos 373-387) and/or |
| | | | VKSEPVSEIEEVAPEEEEDG (SEQ ID NO: 298, pos 449-468) wherein each |
| | | | epitope can be combined in any order and/or in any combination and cloned into a |
| | | | LAMP Construct described herein, wherein each epitope is preferably separated by |
| | | | a linker, such as, for example GPGPG (SEQ ID NO: 299, pos 31-35) or PMGLP |
| | | | (SEQ ID NO: 300, pos 31-35). Representative construct inserts are shown as SEQ |
| | | | ID NO: 299 and SEQ ID NO: 300. |
| 301 | Morphological | AAA66543 | |
| | transforming | | |
| | region II | | |
| | (“MTRII”), | | |
| | Human | | |
| | betaher- | | |
| | pesvirus ”) | | |
| 302 | Representative | | |
| | MTRII LAMP | | |
| | Construct Insert | | |
| 303 | Human | AMJ53524 | |
| | betaherpesvirus | | |
| | 5 | | |
| 304 | US28 | | |
| 305 | IGFBP2 | NP_000588 | Exemplary IGFBP2 antigen sequences also comprise amino acids 39-328 of SEQ |
| | | | ID NO: 128; (b) amino acids 40-328 of SEQ ID NO: 128; (c) amino acids 43-135 of |
| | | | SEQ ID NO: 128; (d) amino acids 1-163 of SEQ ID NO: 128; (e) amino acids 2-163 |
| | | | of SEQ ID NO: 128; (f) amino acids 39-163 of SEQ ID NO: 128; (g) amino acids |
| | | | 40-163 of SEQ ID NO: 128; (h) amino acids 229-309 of SEQ ID NO: 128; (i) |
| | | | amino acids 2-328 of SEQ ID NO: 128; and/or (j) amino acids 1-328 of SEQ ID |
| | | | NO: 128 |
| 306 | HCMVA Viral | P17150 | |
| | interleukin-10 | | |
| | (“IL10”) | | |
| 307 | Representative | | |
| | HCMVA Viral | | |
| | IL-10 LAMP | | |
| | Construct Insert | | |
| 308 | HCMVM Membrane | F5HAM0 | |
| | glycoprotein | | |
| | UL144 (“UL144”) | | |
| 309 | Representative | | |
| | HCMV Membrane | | |
| | glycoprotein | | |
| | UL144 LAMP | | |
| | Construct Insert | | |
| 310 | HCMVM Protein | Q6RJQ3 | |
| | UL141 | | |
| | (“UL141”) | | |
| 311 | Representative | | |
| | HCMV Protein | | |
| | UL141 LAMP | | |
| | Construct Insert | | |
| 312 | HCMVA Unique | P09727 | |
| | short US11 | | |
| | glycoprotein | | |
| | (“US11”) | | |
| 313 | Representative | | |
| | HCMVA Unique | | |
| | Short US11 | | |
| | Glycoprotein | | |
| | LAMP Construct | | |
| | Insert | | |
| 314-317 | HCMV Envelope | A0A0G2TM81 | Exemplary HCMV envelope glycoprotein HOS antigen sequences also include |
| | glycoprotein | | those comprising: TYNSSLRNSTVVRENAISFNFFQSYNQYYVFHMPR (SEQ |
| | H OS | | ID NO: 314, pos 60-94) and/or DLTETLERYQQRLNTYALVSKDLASYRSFS |
| | (“HOS”) | | (SEQ ID NO: 314, pos 110-139) and/or SHTTSGLHRPHFNQTCILFD (SEQ ID |
| | | | NO: 314, pos 180-199) and/or QLNRHSYLKDPDFLDAALDF (SEQ ID NO: |
| | | | 314, pos 285-304), wherein each epitope can be combined in any order and/or in |
| | | | any combination and cloned into a LAMP Construct described herein, wherein |
| | | | each epitope is preferably separated by a linker, such as, for example GPGPG (SEQ |
| | | | ID NO: 316, pos 36-40) or PMGLP (SEQ ID NO: 317, pos 36-40). See, for |
| | | | instance SEQ ID NOs: 315-317. |
| 318-320 | HCMVT Viral | Q6SWP7 | Exemplary IE2 antigen sequences also include those |
| | transcription | | comprising: RRGRVKIDEVSRMFR (SEQ ID NO: 318, pos 356-370) and/or |
| | factor IE2 | | GIQIIYTRNHEVKSE (SEQ ID NO: 318, pos 408-422) and/or |
| | (“IE2”) | | LSTPFLMEHTMPVTHPPEVA (SEQ ID NO: 318, pos 438-457) wherein each |
| | | | epitope can be combined in any order and/or in any combination and cloned into a |
| | | | LAMP Construct described herein, wherein each epitope is preferably separated by |
| | | | a linker, such as, for example GPGPG (SEQ ID NO: 319, pos 16-20) or PMGLP |
| | | | (SEQ ID NO: 320, pos 16-20). See, for instance SEQ ID NOs: 319-320. |
| 321-323 | TERT Isoform 1 | NP_937983.2 | |
| | (“TERT”) | | |
| 324 | Survivin | NP_001125727 | |
| 325-327 | Tetanus | 1AF9_A | Exemplary tetanus antigen sequences also include those |
| | | | comprising:PGINGKAIHLVNNESSE (SEQ ID NO: 325, pos 53-69) and/or |
| | | | FNNFTVSFWLRVPKVSASHLEQYGT (SEQ ID NO: 325, pos 84-108) and/or |
| | | | YVSIDKFRIFCKALNPKEIEKLYTSYLS (SEQ ID NO: 325, pos 220-247) |
| | | | and/or ILRVGYNAPGIPLYKKMEAVKLRDLK (SEQ ID NO: 325, pos 361- |
| | | | 386) wherein each epitope can be combined in any order and/or in any |
| | | | combination and cloned into a LAMP Construct described herein, wherein each |
| | | | epitope is preferably separated by a linker, such as, for example GPGPG (SEQ ID |
| | | | NO: 326, pos 18-22) or PMGLP (SEQ ID NO: 327, pos 18-22). Representative |
| | | | construct inserts are shown as SEQ ID NO: 326 and SEQ ID NO: 327. |
| 328 | Cancer Testis | NP-001318.1 | |
| | Antigen | | |
| | NY-ESO-1 (“NY- | | |
| | ESO-1”) | | |
| 329-331 | HER2 | AAA75493.1 | A further example HER2 antigen sequence comprises SEQ ID NO: 198, and is |
| | | | encoded by SEQ ID NO: 199. |
| 332-334 | HER3 | NP_001973.2 | Construct comprising at least one of: amino acids 20-643, 665-1201, and/or 1209- |
| | | | 1342 of SEQ ID NO: 332, wherein each epitope can be combined in any order |
| | | | and/or in any combination and cloned into a LAMP Construct described herein, |
| | | | wherein each epitope is preferably separated by a linker, such as, for example |
| | | | GPGPG or PMGLP. Representative construct inserts are shown as SEQ ID |
| | | | NO: 333 and SEQ ID NO: 334. |
| 335 | HVEM | NP_003811.2 | An example is a sequence comprising amino acids 39-202 of SEQ ID NO: 335 |
| 336 | | | |
| 337-340 | HPV Constructs | | Examples include sequences used to create the constructs: (a) HPV 16 E6 (SEQ |
| | | | ID NO: 337); (b) HPV 18 E6 (SEQ ID NO: 338); (c) HPV 16 E7 (SEQ ID |
| | | | NO: 339); (d) HPV 18 E7 (SEQ ID NO: 340) |
| | | | Representative Constructs: |
| | | | SEQ ID NO: 341 (Representative HPV 16 E6-E7 Construct) |
| | | | SEQ ID NO: 342 (Representative HPV 18 E6-E7 Construct) |
| | | | SEQ ID NO: 343 (HPV 16 E6-linker-HPV 18 E6-linker-HPV 16 E7-linker- |
| | | | HPV 18 E7) |
| 346-349 | EBV Constructs | | Any of the following sequences, in any combination, could be used to create the |
| | | | constructs (a) EBV EBNA1 (SEQ ID NO: 346); (b) EBV Truncated EBNA-1 |
| | | | (SEQ ID NO: 347); (c) EBV gp350 (SEQ ID NO: 348); (d) EBV LMP2 (SEQ ID |
| | | | NO: 349). For example, a representative construct could comprise truncated |
| | | | EBNA-1 and LMP2. |
| 351-352 | HBV Constructs | | Any of the following sequences could be used (in either orientation) to create the |
| | | | constructs: |
| | | | HBV Middle S Protein (SEQ ID NO: 351) and HBV X Protein (SEQ ID NO: |
| | | | 352). For example, a representative construct could comprise Middle S Protein-X |
| | | | protein. |
| 353 | TIGIT | | |
| 354 | TEM8 | | |
| 355 | TEM1 | | |
| 356 | HER2 ECD + TM | | |
| 357 | CEA | | |
| 358 | TARP | | |
| 359 | PROSTEIN | | |
| 360 | PSMA | | |
| 361 | BIRC4 | | |
| 362 | Mucin-1 | | |
| 363 | Mucin-1 Isoform | | |
| 364 | CD40 Ligand | | |
| 352 | WT-1 | | |
| 366 | WT-1 Truncated | | |
| 367 | PRAME | | |
| 368 | LAGE-1 | | |
| 369 | MAGE A3 | | |
| 370-374 | Survivin | NP_001125727 | Representative constructs include those comprising one of SEQ ID NO: 370-374 |
| 375 | 1A01_HLA-A/m | UniProtKB: P30443 | |
| 376 | 1A02 | UniProtKB: P01892 | |
| 377 | 5T4 | UniProtKB: Q13641 | |
| 378 | ACRBP | UniProtKB: Q8NEB7 | |
| 379 | AFP | UniProtKB: P02771 | |
| 380 | AKAP4 | UniProtKB: Q5JQC9 | |
| 381 | alpha-actinin-_ | UniProtKB: B4DSX0 | |
| | 4/m | | |
| 382 | alpha-actinin-_ | UniProtKB: B4E337 | |
| | 4/m | | |
| 383 | alpha-actinin-_ | UniProtKB: O43707 | |
| | 4/m | | |
| 384 | alpha- | UniProtKB: A0A024RE16 | |
| | methylacyl- | | |
| | coenzyme_A_ | | |
| | racemase | | |
| 385 | alpha- | UniProtKB: A8KAC3 | |
| | methylacyl- | | |
| | coenzyme_A_ | | |
| | racemase | | |
| 386 | ANDR | UniProtKB: P10275 | |
| 387 | ART-4 | UniProtKB: Q9ULX3 | |
| 388 | ARTC1/m | UniProtKB: P52961 | |
| 389 | AURKB | UniProtKB: Q96GD4 | |
| 390 | B2MG | UniProtKB: P61769 | |
| 391 | B3GN5 | UniProtKB: Q9BYG0 | |
| 392 | B4GN1 | UniProtKB: Q00973 | |
| 393 | B7H4 | UniProtKB: Q7Z7D3 | |
| 394 | BAGE-1 | UniProtKB: Q13072 | |
| 395 | BASI | UniProtKB: P35613 | |
| 396 | BCL-2 | UniProtKB: A9QXG9 | |
| 397 | bcr/abl | UniProtKB: A9UEZ4 | |
| 398 | bcr/abl | UniProtKB: A9UEZ7 | |
| 399 | bcr/abl | UniProtKB: A9UEZ8 | |
| 400 | bcr/abl | UniProtKB: A9UEZ9 | |
| 401 | bcr/abl | UniProtKB: A9UF00 | |
| 402 | bcr/abl | UniProtKB: A9UF01 | |
| 403 | bcr/abl | UniProtKB: A9UF03 | |
| 404 | bcr/abl | UniProtKB: A9UF04 | |
| 405 | bcr/abl | UniProtKB: A9UF05 | |
| 406 | bcr/abl | UniProtKB: A9UF06 | |
| 407 | bcr/abl | UniProtKB: A9UF08 | |
| 408 | beta-catenin/m | UniProtKB: P35222 | |
| 409 | beta-catenin/m | UniProtKB: Q8WYA6 | |
| 410 | BING-4 | UniProtKB: O15213 | |
| 411 | BIRC7 | UniProtKB: Q96CA5 | |
| 412 | BRCA1/m | UniProtKB: A0A024R1V0 | |
| 413 | BRCA1/m | UniProtKB: A0A024R1V7 | |
| 414 | BRCA1/m | UniProtKB: A0A024R1Z8 | |
| 415 | BRCA1/m | UniProtKB: A0A068BFX7 | |
| 416 | BRCA1/m | UniProtKB: C6YB45 | |
| 417 | BRCA1/m | UniProtKB: C6YB47 | |
| 418 | BRCA1/m | UniProtKB: G3XAC3 | |
| 419 | BY55 | UniProtKB: O95971 | |
| 420 | CAMEL | UniProtKB: O95987 | |
| 421 | CASPA | UniProtKB: Q92851-4 | |
| 422 | cathepsin_B | UniProtKB: A0A024R374 | |
| 423 | cathepsin_B | UniProtKB: P07858 | |
| 424 | cathepsin_L | UniProtKB: A0A024R276 | |
| 425 | cathepsin_L | UniProtKB: P07711 | |
| 426 | cathepsin_L | UniProtKB: Q9HBQ7 | |
| 427 | CD1A | UniProtKB: P06126 | |
| 428 | CD1B | UniProtKB: P29016 | |
| 429 | CD1C | UniProtKB: P29017 | |
| 430 | CD1D | UniProtKB: P15813 | |
| 431 | CD1E | UniProtKB: P15812 | |
| 432 | CD20 | UniProtKB: P11836 | |
| 433 | CD22 | UniProtKB: O60926 | |
| 434 | CD22 | UniProtKB: P20273 | |
| 435 | CD22 | UniProtKB: QUEAF5 | |
| 436 | CD276 | UniProtKB: Q5ZPR3 | |
| 437 | CD33 | UniProtKB: B4DF51 | |
| 438 | CD33 | UniProtKB: P20138 | |
| 439 | CD33 | UniProtKB: Q546G0 | |
| 440 | CD3E | UniProtKB: P07766 | |
| 441 | CD3Z | UniProtKB: P20963 | |
| 442 | CD44_Isoform_1 | UniProtKB: P16070 | |
| 443 | CD44_Isoform_6 | UniProtKB: P16070-6 | |
| 444 | CD4 | UniProtKB: P01730 | |
| 445 | CD52 | UniProtKB: P31358 | |
| 446 | CD52 | UniProtKB: Q6IBD0 | |
| 447 | CD52 | UniProtKB: V9HWN9 | |
| 448 | CD55 | UniProtKB: B1AP15 | |
| 449 | CD55 | UniProtKB: D3DT85 | |
| 450 | CD55 | UniProtKB: D3DT86 | |
| 451 | CD55 | UniProtKB: P08174 | |
| 452 | CD56 | UniProtKB: P13591 | |
| 453 | CD80 | UniProtKB: A0N0P2 | |
| 454 | CD80 | UniProtKB: P33681 | |
| 455 | CD86 | UniProtKB: P42081 | |
| 456 | CD8A | UniProtKB: P01732 | |
| 457 | CDC27/m | UniProtKB: G5EA36 | |
| 458 | CDC27/m | UniProtKB: P30260 | |
| 459 | CDE30 | UniProtKB: P28908 | |
| 460 | CDK4/m | UniProtKB: A0A024RBB6 | |
| 461 | CDK4/m | UniProtKB: P11802 | |
| 462 | CDK4/m | UniProtKB: Q6LC83 | |
| 463 | CDK4/m | UniProtKB: Q96BE9 | |
| 464 | CDKN2A/m | UniProtKB: D1LYX3 | |
| 465 | CDKN2A/m | UniProtKB: G3XAG3 | |
| 466 | CDKN2A/m | UniProtKB: K7PML8 | |
| 467 | CDKN2A/m | UniProtKB: L8E941 | |
| 468 | CDKN2A/m | UniProtKB: Q8N726 | |
| 469 | CEA | RefSeq: NP_004354 | |
| 470 | CEAM6 | UniProtKB: P40199 | |
| 471 | CH3L2 | UniProtKB: Q15782 | |
| 472 | CLCA2 | UniProtKB: Q9UQC9 | |
| 473 | CML28 | UniProtKB: Q9NQT4 | |
| 474 | CML66 | UniProtKB: Q96RS6 | |
| 475 | COA-1/m | UniProtKB: Q5T124 | |
| 476 | coactosin- | UniProtKB: Q14019 | |
| | like_protein | | |
| 477 | collagen_XXIII | UniProtKB: L8EAS4 | |
| 478 | collagen_XXIII | UniProtKB: Q86Y22 | |
| 479 | COX-2 | UniProtKB: Q6ZYK7 | |
| 480 | CP1B1 | UniProtKB: Q16678 | |
| 481 | CSAG2 | UniProtKB: Q9Y5P2-2 | |
| 482 | CSAG2 | UniProtKB: Q9Y5P2 | |
| 483 | CT45A1 | UniProtKB: Q5HYN5 | |
| 484 | CT55 | UniProtKB: Q8WUE5 | |
| 485 | CT-_9/BRD6 | UniProtKB: Q58F21 | |
| 48 | CTAG2_Isoform_ | UniProtKB: O75638-2 | |
| | LAGE-1A | | |
| 487 | CTAG2_Isoform_ | UniProtKB: O75638 | |
| | LAGE-1B | | |
| 488 | CTCFL | UniProtKB: Q8NI51 | |
| 489 | Cten | UniProtKB: Q8IZW8 | |
| 490 | cyclin_B1 | UniProtKB: P14635 | |
| 491 | cyclin_D1 | UniProtKB: P24385 | |
| 492 | cyp-B | UniProtKB: P23284 | |
| 493 | DAM-10 | UniProtKB: P43366 | |
| 494 | DEP1A | UniProtKB: Q5TB30 | |
| 495 | E7 | UniProtKB: P03129 | |
| 496 | E7 | UniProtKB: P06788 | |
| 497 | E7 | UniProtKB: P17387 | |
| 498 | E7 | UniProtKB: P06429 | |
| 499 | E7 | UniProtKB: P27230 | |
| 500 | E7 | UniProtKB: P24837 | |
| 501 | E7 | UniProtKB: P21736 | |
| 502 | E7 | UniProtKB: P26558 | |
| 503 | E7 | UniProtKB: P36831 | |
| 504 | E7 | UniProtKB: P36833 | |
| 505 | E7 | UniProtKB: Q9QCZ1 | |
| 506 | E7 | UniProtKB: Q81965 | |
| 507 | E7 | UniProtKB: Q80956 | |
| 508 | EF1A2 | UniProtKB: Q05639 | |
| 509 | EFTUD2/m | UniProtKB: Q15029 | |
| 510 | EGFR | UniProtKB: A0A0B4J1Y5 | |
| 511 | EGFR | UniProtKB: E7BSV0 | |
| 512 | EGFR | UniProtKB: L0R6G1 | |
| 513 | EGFR | UniProtKB: P00533-2 | |
| 514 | EGFR | UniProtKB: P00533 | |
| 515 | EGFR | UniProtKB: Q147T7 | |
| 516 | EGFR | UniProtKB: Q504U8 | |
| 517 | EGFR | UniProtKB: Q8NDU8 | |
| 518 | EGLN3 | UniProtKB: Q9H6Z9 | |
| 519 | ELF2/m | UniProtKB: B7Z720 | |
| 520 | EMMPRIN | UniProtKB: Q54A51 | |
| 521 | EpCam | UniProtKB: P16422 | |
| 522 | EphA2 | UniProtKB: P29317 | |
| 523 | EphA3 | UniProtKB: P29320 | |
| 524 | EphA3 | UniProtKB: Q6P4R6 | |
| 525 | ErbB3 | UniProtKB: B3KWG5 | |
| 526 | ErbB3 | UniProtKB: B4DGQ7 | |
| 527 | ERBB4 | UniProtKB: Q15303 | |
| 528 | ERG | UniProtKB: P11308 | |
| 529 | ETV6 | UniProtKB: P41212 | |
| 530 | EWS | UniProtKB: Q01844 | |
| 531 | EZH2 | UniProtKB: F2YMM1 | |
| 532 | EZH2 | UniProtKB: G3XAL2 | |
| 533 | EZH2 | UniProtKB: L0R855 | |
| 534 | EZH2 | UniProtKB: Q15910 | |
| 535 | EZH2 | UniProtKB: S4S3R8 | |
| 536 | FABP7 | UniProtKB: O15540 | |
| 537 | FCGR3A_Version_1 | UniProtKB: P08637 | |
| 538 | FCGR3A_Version_2 | CCDS: CCDS1232.1 | |
| 539 | FGF5 | UniProtKB: P12034 | |
| 540 | FGF5 | UniProtKB: Q60518 | |
| 541 | FGFR2 | UniProtKB: P21802 | |
| 542 | fibronectin | UniProtKB: A0A024R516 | |
| 543 | fibronectin | UniProtKB: A0A024RB01 | |
| 544 | fibronectin | UniProtKB: A0A024RDT9 | |
| 545 | fibronectin | UniProtKB: A0A024RDV5 | |
| 546 | fibronectin | UniProtKB: A6NH44 | |
| 547 | fibronectin | UniProtKB: A8K6A5 | |
| 548 | fibronectin | UniProtKB: B2R627 | |
| 549 | fibronectin | UniProtKB: B3KXM5 | |
| 550 | fibronectin | UniProtKB: B4DIC5 | |
| 551 | fibronectin | UniProtKB: B4DN21 | |
| 552 | fibronectin | UniProtKB: B4DS98 | |
| 553 | fibronectin | UniProtKB: B4DTH2 | |
| 554 | fibronectin | UniProtKB: B4DTK1 | |
| 555 | fibronectin | UniProtKB: B4DU16 | |
| 556 | fibronectin | UniProtKB: B7Z3W5 | |
| 557 | fibronectin | UniProtKB: B7Z939 | |
| 558 | fibronectin | UniProtKB: G5E9X3 | |
| 559 | fibronectin | UniProtKB: Q9H382 | |
| 560 | FOS | UniProtKB: P01100 | |
| 561 | FOXP3 | UniProtKB: Q9BZS1 | |
| 562 | FUT1 | UniProtKB: P19526 | |
| 563 | G250 | UniProtKB: Q16790 | |
| 564 | GAGE-1 | Genbank: AAA82744 | |
| 565 | GAGE-2 | UniProtKB: Q6NT46 | |
| 566 | GAGE-3 | UniProtKB: Q13067 | |
| 567 | GAGE-4 | UniProtKB: Q13068 | |
| 568 | GAGE-5 | UniProtKB: Q13069 | |
| 569 | GAGE-6 | UniProtKB: Q13070 | |
| 570 | GAGE7b | UniProtKB: O76087 | |
| 571 | GAGE-8_ | UniProtKB: Q9UEU5 | |
| | (GAGE-2D) | | |
| 572 | GASR | UniProtKB: P32239 | |
| 573 | GnT-V | UniProtKB: Q09328 | |
| 574 | GPC3 | UniProtKB: I6QJG3 | |
| 575 | GPC3 | UniProtKB: P51654 | |
| 576 | GPC3 | UniProtKB: Q8IYG2 | |
| 577 | GPNMB/m | UniProtKB: A0A024RA55 | |
| 578 | GPNMB/m | UniProtKB: Q14956 | |
| 579 | GPNMB/m | UniProtKB: Q8IXJ5 | |
| 580 | GPNMB/m | UniProtKB: Q96F58 | |
| 581 | GRM3 | UniProtKB: Q14832 | |
| 582 | HAGE | UniProtKB: Q9NXZ2 | |
| 583 | hepsin | UniProtKB: B2ZDQ2 | |
| 584 | hepsin | UniProtKB: P05981 | |
| 585 | Her2/neu | UniProtKB: B4DTR1 | |
| 586 | Her2/neu | UniProtKB: L8E8G2 | |
| 587 | Her2/neu | UniProtKB: P04626 | |
| 588 | Her2/neu | UniProtKB: Q9UK79 | |
| 589 | HLA-A2/m | UniProtKB: Q95387 | |
| 590 | HLA-A2/m | UniProtKB: Q9MYF8 | |
| 591 | homeobox_NKX3.1 | UniProtKB: Q99801 | |
| 592 | HOM-TES-85 | UniProtKB: B2RBQ6 | |
| 593 | HOM-TES-85 | UniProtKB: Q9P127 | |
| 594 | HPG1 | Pubmed: 12543784 | |
| 595 | HS71A | UniProtKB: P0DMV8 | |
| 596 | HS71B | UniProtKB: P0DMV9 | |
| 597 | HST-2 | UniProtKB: P10767 | |
| 598 | hTERT | UniProtKB: O94807 | |
| 599 | iCE | UniProtKB: O00748 | |
| 600 | IF2B3 | UniProtKB: O00425 | |
| 601 | IL-13Ra2 | UniProtKB: Q14627 | |
| 602 | IL2-RA | UniProtKB: P01589 | |
| 603 | IL2-RB | UniProtKB: P14784 | |
| 604 | IL2-RG | UniProtKB: P31785 | |
| 605 | IMP3 | UniProtKB: Q9NV31 | |
| 606 | ITA5 | UniProtKB: P08648 | |
| 607 | ITB1 | UniProtKB: P05556 | |
| 608 | ITB6 | UniProtKB: P18564 | |
| 609 | kallikrein-2 | UniProtKB: A0A024R4J4 | |
| 610 | kallikrein-2 | UniProtKB: A0A024R4N3 | |
| 611 | kallikrein-2 | UniProtKB: B0AZU9 | |
| 612 | kallikrein-2 | UniProtKB: B4DU77 | |
| 613 | kallikrein-2 | UniProtKB: P20151 | |
| 614 | kallikrein-2 | UniProtKB: Q6T774 | |
| 615 | kallikrein-2 | UniProtKB: Q6T775 | |
| 616 | kallikrein-4 | UniProtKB: A0A0C4DFQ5 | |
| 617 | kallikrein-4 | UniProtKB: Q5BQA0 | |
| 618 | kallikrein-4 | UniProtKB: Q96PT0 | |
| 619 | kallikrein-4 | UniProtKB: Q96PT1 | |
| 620 | kallikrein-4 | UniProtKB: Q9Y5K2 | |
| 621 | KI20A | UniProtKB: O95235 | |
| 622 | KIAA0205 | UniProtKB: Q92604 | |
| 623 | KIF2C | UniProtKB: Q99661 | |
| 624 | KK-LC-1 | UniProtKB: Q5H943 | |
| 625 | LDLR | UniProtKB: P01130 | |
| 626 | LGMN | UniProtKB: Q99538 | |
| 627 | LIRB2 | UniProtKB: Q8N423 | |
| 628 | LY6K | UniProtKB: Q17RY6 | |
| 629 | MAGA5 | UniProtKB: P43359 | |
| 630 | MAGA8 | UniProtKB: P43361 | |
| 631 | MAGAB | UniProtKB: P43364 | |
| 632 | MAGE-A10 | UniProtKB: A0A024RC14 | |
| 633 | MAGE-A12 | UniProtKB: P43365 | |
| 634 | MAGE-A1 | UniProtKB: P43355 | |
| 635 | MAGE-A2 | UniProtKB: P43356 | |
| 636 | MAGE-A3 | UniProtKB: P43357 | |
| 637 | MAGE-A4 | UniProtKB: A0A024RC12 | |
| 638 | MAGE-A4 | UniProtKB: P43358 | |
| 639 | MAGE-A4 | UniProtKB: Q1RN33 | |
| 640 | MAGE-A6 | UniProtKB: A8K072 | |
| 641 | MAGE-A6 | UniProtKB: P43360 | |
| 642 | MAGE-A6 | UniProtKB: Q6FHI5 | |
| 643 | MAGE-A9 | UniProtKB: P43362 | |
| 644 | MAGE-B10 | UniProtKB: Q96LZ2 | |
| 645 | MAGE-B16 | UniProtKB: A2A368 | |
| 646 | MAGE-B17 | UniProtKB: A8MXT2 | |
| 647 | MAGE-_B1 | UniProtKB: Q96TG1 | |
| 648 | MAGE-B2 | UniProtKB: O15479 | |
| 649 | MAGE-B3 | UniProtKB: O15480 | |
| 650 | MAGE-B4 | UniProtKB: O15481 | |
| 651 | MAGE-B5 | UniProtKB: Q9BZ81 | |
| 652 | MAGE-B6 | UniProtKB: Q8N7X4 | |
| 653 | MAGE-C1 | UniProtKB: O60732 | |
| 654 | MAGE-C2 | UniProtKB: Q9UBF1 | |
| 655 | MAGE-C3 | UniProtKB: Q8TD91 | |
| 656 | MAGE-D1 | UniProtKB: Q9Y5V3 | |
| 657 | MAGE-D2 | UniProtKB: Q9UNF1 | |
| 658 | MAGE-D4 | UniProtKB: Q96JG8 | |
| 659 | MAGE-_E1 | UniProtKB: Q6IAI7 | |
| 660 | MAGE- | UniProtKB: Q9HCI5 | |
| | E1_(MAGE1) | | |
| 661 | MAGE-E2 | UniProtKB: Q8TD90 | |
| 662 | MAGE-F1 | UniProtKB: Q9HAY2 | |
| 663 | MAGE-H1 | UniProtKB: Q9H213 | |
| 664 | MAGEL2 | UniProtKB: Q9UJ55 | |
| 665 | mammaglobin_A | UniProtKB: Q13296 | |
| 666 | mammaglobin_A | UniProtKB: Q6NX70 | |
| 667 | MART-1/melan-A | UniProtKB: Q16655 | |
| 668 | MART-2 | UniProtKB: Q5VTY9 | |
| 669 | MC1_R | UniProtKB: Q01726 | |
| 670 | MC1_R | UniProtKB: Q1JUL4 | |
| 671 | MC1_R | UniProtKB: Q1JUL6 | |
| 672 | MC1_R | UniProtKB: Q1JUL8 | |
| 673 | MC1_R | UniProtKB: Q1JUL9 | |
| 674 | MC1 R | UniProtKB: Q1JUM0 | |
| 675 | MC1_R | UniProtKB: Q1JUM2 | |
| 676 | MC1_R | UniProtKB: Q1JUM3 | |
| 677 | MC1_R | UniProtKB: Q1JUM4 | |
| 678 | MC1_R | UniProtKB: Q1JUM5 | |
| 679 | MC1_R | UniProtKB: Q6UR92 | |
| 680 | MC1_R | UniProtKB: Q6UR94 | |
| 681 | MC1_R | UniProtKB: Q6UR95 | |
| 682 | MC1_R | UniProtKB: Q6UR96 | |
| 683 | MC1_R | UniProtKB: Q6UR97 | |
| 684 | MC1_R | UniProtKB: Q6UR98 | |
| 685 | MC1_R | UniProtKB: Q6UR99 | |
| 686 | MC1_R | UniProtKB: Q6URA0 | |
| 687 | MC1_R | UniProtKB: Q86YW1 | |
| 688 | MC1 R | UniProtKB: V9Q5S2 | |
| 689 | MC1_R | UniProtKB: V9Q671 | |
| 690 | MC1_R | UniProtKB: V9Q783 | |
| 691 | MC1_R | UniProtKB: V9Q7F1 | |
| 692 | MC1_R | UniProtKB: V9Q8N1 | |
| 693 | MC1_R | UniProtKB: V9Q977 | |
| 694 | MC1_R | UniProtKB: V9Q9P5 | |
| 695 | MC1_R | UniProtKB: V9Q9R8 | |
| 696 | MC1_R | UniProtKB: V9QAE0 | |
| 697 | MC1_R | UniProtKB: V9QAR2 | |
| 698 | MC1_R | UniProtKB: V9QAW3 | |
| 699 | MC1_R | UniProtKB: V9QB02 | |
| 700 | MC1_R | UniProtKB: V9QB58 | |
| 701 | MC1_R | UniProtKB: V9QBY6 | |
| 702 | MC1_R | UniProtKB: V9QC17 | |
| 703 | MC1_R | UniProtKB: V9QC66 | |
| 704 | MC1_R | UniProtKB: V9QCQ4 | |
| 705 | MC1_R | UniProtKB: V9QDF4 | |
| 706 | MC1_R | UniProtKB: V9QDN7 | |
| 707 | MC1_R | UniProtKB: V9QDQ6 | |
| 708 | mesothelin | UniProtKB: Q13421 | |
| 709 | MITF | UniProtKB: O75030-8 | |
| 710 | MITF | UniProtKB: O75030-9 | |
| 711 | MITF | UniProtKB: O75030 | |
| 712 | MMP1_1 | UniProtKB: B3KQS8 | |
| 713 | MMP7 | UniProtKB: P09237 | |
| 714 | MUC-1 | Genbank: AAA60019 | |
| 715 | MUM-1/m | RefSeq: NP_116242 | |
| 716 | MUM-2/m | UniProtKB: Q9Y5R8 | |
| 717 | MYO1A | UniProtKB: Q9UBC5 | |
| 718 | MYO1B | UniProtKB: O43795 | |
| 719 | MYO1C | UniProtKB: O00159 | |
| 720 | MYO1D | UniProtKB: O94832 | |
| 721 | MYO1E | UniProtKB: Q12965 | |
| 722 | MYO1F | UniProtKB: O00160 | |
| 723 | MYO1G | UniProtKB: B0I1T2 | |
| 724 | MYO1H | RefSeq: NP_001094891 | |
| 725 | NA17 | UniProtKB: Q3V5L5 | |
| 726 | NA88-A | Pubmed: 10790436 | |
| 727 | Neo-PAP | UniProtKB: Q9BWT3 | |
| 728 | NFYC/m | UniProtKB: Q13952 | |
| 729 | NGEP | UniProtKB: Q6IWH7 | |
| 730 | NPM | UniProtKB: P06748 | |
| 731 | NRCAM | UniProtKB: Q92823 | |
| 732 | NSE | UniProtKB: P09104 | |
| 733 | NUF2 | UniProtKB: Q9BZD4 | |
| 734 | NY-ESO-1 | UniProtKB: P78358 | |
| 735 | OA1 | UniProtKB: P51810 | |
| 736 | OGT | UniProtKB: O15294 | |
| 737 | OS-9 | UniProtKB: B4DH11 | |
| 738 | OS-9 | UniProtKB: B4E321 | |
| 739 | OS-9 | UniProtKB: B7Z8E7 | |
| 740 | OS-9 | UniProtKB: Q13438 | |
| 741 | osteocalcin | UniProtKB: P02818 | |
| 742 | osteopontin | UniProtKB: A0A024RDE2 | |
| 743 | osteopontin | UniProtKB: A0A024RDE6 | |
| 744 | osteopontin | UniProtKB: A0A024RDJ0 | |
| 745 | osteopontin | UniProtKB: B7Z351 | |
| 746 | osteopontin | UniProtKB: F2YQ21 | |
| 747 | osteopontin | UniProtKB: P10451 | |
| 748 | p53 | UniProtKB: P04637 | |
| 749 | PAGE-4 | UniProtKB: O60829 | |
| 750 | PAI-1 | UniProtKB: P05121 | |
| 751 | PAI-2 | UniProtKB: P05120 | |
| 752 | PAP | UniProtKB: Q06141 | |
| 753 | PAP | UniProtKB: Q53S56 | |
| 754 | PATE | UniProtKB: Q8WXA2 | |
| 755 | PAX3 | UniProtKB: P23760 | |
| 756 | PAX5 | UniProtKB: Q02548 | |
| 757 | PD1L1 | UniProtKB: Q9NZQ7 | |
| 758 | PDCD1 | UniProtKB: Q15116 | |
| 759 | PDEF | UniProtKB: O95238 | |
| 760 | PECA1 | UniProtKB: P16284 | |
| 761 | PGCB | UniProtKB: Q96GW7 | |
| 762 | PGFRB | UniProtKB: P09619 | |
| 763 | Pim-1 -Kinase | UniProtKB: A0A024RD25 | |
| 764 | Pin-1 | UniProtKB: O15428 | |
| 765 | Pin-1 | UniProtKB: Q13526 | |
| 766 | Pin-1 | UniProtKB: Q49AR7 | |
| 767 | PLAC1 | UniProtKB: Q9HBJ0 | |
| 768 | PMEL | UniProtKB: P40967 | |
| 769 | PML | UniProtKB: P29590 | |
| 770 | POTEF | UniProtKB: A5A3E0 | |
| 771 | POTE | UniProtKB: Q86YR6 | |
| 772 | PRAME | UniProtKB: A0A024R1E6 | |
| 773 | PRAME | UniProtKB: P78395 | |
| 774 | PRDX5/m | UniProtKB: P30044 | |
| 775 | PRM2 | UniProtKB: P04554 | |
| 776 | prostein | UniProtKB: Q96JT2 | |
| 777 | proteinase-3 | UniProtKB: D6CHE9 | |
| 778 | proteinase-3 | UniProtKB: P24158 | |
| 779 | PSA | UniProtKB: P55786 | |
| 780 | PSB9 | UniProtKB: P28065 | |
| 781 | PSCA | UniProtKB: D3DWI6 | |
| 782 | PSCA | UniProtKB: O43653 | |
| 783 | PSGR | UniProtKB: Q9H255 | |
| 784 | PSM | UniProtKB: Q04609 | |
| 785 | PTPRC | RefSeq: NP_002829 | |
| 786 | RAB8A | UniProtKB: P61006 | |
| 787 | RAGE-1 | UniProtKB: Q9UQ07 | |
| 788 | RARA | UniProtKB: P10276 | |
| 789 | RASH | UniProtKB: P01112 | |
| 790 | RASK | UniProtKB: P01116 | |
| 791 | RASN | UniProtKB: P01111 | |
| 792 | RGS5 | UniProtKB: O15539 | |
| 793 | RHAMM/CD168 | UniProtKB: O75330 | |
| 794 | RHOC | UniProtKB: P08134 | |
| 795 | RSSA | UniProtKB: P08865 | |
| 796 | RU1 | UniProtKB: Q9UHJ3 | |
| 797 | RU2 | UniProtKB: Q9UHG0 | |
| 798 | RUNX1 | UniProtKB: Q01196 | |
| 799 | S-100 | UniProtKB: V9HW39 | |
| 800 | SAGE | UniProtKB: Q9NXZ1 | |
| 801 | SART-_1 | UniProtKB: O43290 | |
| 802 | SART-2 | UniProtKB: Q9UL01 | |
| 803 | SART-3 | UniProtKB: Q15020 | |
| 804 | SEPR | UniProtKB: Q12884 | |
| 805 | SIA7F | UniProtKB: Q969X2 | |
| 806 | SIA8A | UniProtKB: Q92185 | |
| 807 | SIAT9 | UniProtKB: Q9UNP4 | |
| 808 | SIRT2/m | UniProtKB: A0A024R0G8 | |
| 809 | SIRT2/m | UniProtKB: Q8IXJ6 | |
| 810 | SOX10 | UniProtKB: P56693 | |
| 811 | SP17 | UniProtKB: Q15506 | |
| 812 | SPNXA | UniProtKB: Q9NS26 | |
| 813 | SPXN3 | UniProtKB: Q5MJ09 | |
| 814 | SSX-1 | UniProtKB: Q16384 | |
| 815 | SSX-2 | UniProtKB: Q16385 | |
| 816 | SSX3 | UniProtKB: Q99909 | |
| 817 | SSX-4 | UniProtKB: O60224 | |
| 818 | ST1A1 | UniProtKB: P50225 | |
| 819 | STAG2 | UniProtKB: Q8N3U4-2 | |
| 820 | STAMP-1 | UniProtKB: Q8NFT2 | |
| 821 | STEAP-1 | UniProtKB: A0A024RA63 | |
| 822 | STEAP-1 | UniProtKB: Q9UHE8 | |
| 823 | Survivin-2B | UniProtKB: O15392-2 | |
| 824 | survivin | UniProtKB: O15392 | |
| 825 | SYCP1 | UniProtKB: A0A024R0I2 | |
| 826 | SYCP1 | UniProtKB: B7ZLS9 | |
| 827 | SYCP1 | UniProtKB: Q15431 | |
| 828 | SYCP1 | UniProtKB: Q3MHC4 | |
| 829 | SYT-SSX-1 | UniProtKB: A4PIV7 | |
| 830 | SYT-SSX-1 | UniProtKB: A4PIV8 | |
| 831 | SYT-SSX-2 | UniProtKB: A4PIV9 | |
| 832 | SYT-SSX-2 | UniProtKB: A4PIW0 | |
| 833 | TARP | UniProtKB: Q0VGM3 | |
| 834 | TCRg | UniProtKB: A2JGV3 | |
| 835 | TF2AA | UniProtKB: P52655 | |
| 836 | TGFR2 | UniProtKB: P37173 | |
| 837 | TGM-4 | UniProtKB: B2R7D1 | |
| 838 | TIE2 | UniProtKB: Q02763 | |
| 839 | TKTL1 | UniProtKB: P51854 | |
| 840 | TPI/m | UniProtKB: P60174 | |
| 841 | TRGV11 | UniProtKB: Q99601 | |
| 842 | TRGV9 | UniProtKB: A4D1X2 | |
| 843 | TRGV9 | UniProtKB: Q99603 | |
| 844 | TRGV9 | UniProtKB: Q99604 | |
| 845 | TRPC1 | UniProtKB: P48995 | |
| 846 | TRP-p8 | UniProtKB: Q7Z2W7 | |
| 847 | TSG10 | UniProtKB: Q9BZW7 | |
| 848 | TSPY1 | UniProtKB: Q01534 | |
| 849 | TVC_(TRGV3) | Genbank: M13231.1 | |
| 850 | TX101 | UniProtKB: Q9BY14-2 | |
| 851 | tyrosinase | UniProtKB: A0A024DBG7 | |
| 853 | tyrosinase | UniProtKB: L8B082 | |
| 853 | tyrosinase | UniProtKB: L8B086 | |
| 854 | tyrosinase | UniProtKB: L8B0B9 | |
| 855 | tyrosinase | UniProtKB: O75767 | |
| 856 | tyrosinase | UniProtKB: P14679 | |
| 857 | tyrosinase | UniProtKB: U3M8N0 | |
| 858 | tyrosinase | UniProtKB: U3M9D5 | |
| 859 | tyrosinase | UniProtKB: U3M9J2 | |
| 860 | TYRP1 | UniProtKB: P17643 | |
| 861 | TYRP2 | UniProtKB: P40126 | |
| 862 | UPA | UniProtKB: Q96NZ9 | |
| 863 | VEGFR1 | UniProtKB: B5A924 | |
| 864 | WT1 | UniProtKB: A0A0H5AUY0 | |
| 865 | WT1 | UniProtKB: P19544 | |
| 866 | WT1 | UniProtKB: Q06250 | |
| 867 | XAGE1 | UniProtKB: Q9HD64 | |
| 868 | IL-10 | UniProtKB: P22301 | |
| 869 | IL-5 | UniProtKB: P05113 | |
| 870 | M-CSF | UniProtKB: P09603 | |
| 871 | TGFbeta1 | UniProtKB: P01137 | |
| 872 | Caspase_8 | UniProtKB: Q14790 | |
| 873 | SERPINB5 | UniProtKB: P36952 | |
| 874 | calreticulin | UniProtKB: B4DHR1 | |
| 875 | calreticulin | UniProtKB: B4E2Y9 | |
| 876 | calreticulin | UniProtKB: P27797 | |
| 877 | calreticulin | UniProtKB: Q96L12 | |
| 878 | N-myc | UniProtKB: P04198 | |

[0360] Additionally, the antigens (including the sequences/fragments/epitopes shown in column 4) described in Table A can be cloned into the LAMP-antigen constructs described herein either individually, or in combination with one another. Thus, each one of the sequences shown in column 1 of Table A, including the epitopes/fragments described in column 4 of Table 1 can be used to generate a LAMP-antigen construct in combination with another sequence also selected from column 1 or column 4 of Table A. In the case of a nucleic acid construct or a cell harboring such a nucleic acid construct, the construct may encode one or more of the antigens listed in Table A or otherwise herein, for example. Furthermore, an IREG sequence may also be included as a second polypeptide (or in the case of a nucleic acid vector or cell harboring such a vector, a coding sequence for an IREG), in order to generate a bicistronic LAMP construct.

[0361] The order of the combination of antigens in a particular LAMP-antigen construct can also vary. For example, the names pp65, gB, IE1, MTRII, US28, IGFBP2, IL10, UL144, UL141, US11, HOS, IE2, TERT, Survivin, Tetanus, NY-ESO-1, HER2, HER3, HVEM, HPV16E6, HPV18E6, HPV16E7, HPV18E7, EBNA1, EBNA trunc, gp350, LMP2, GCP3, Middle S, X Protein, TIGIT, TEM8, TEM1, HER2 ECD+TM, CEA, TARP, PROSTEIN, PSMA, BIRC4, MUCIN-1, MUCIN-1 iso, CD40-L, WT-1, WT-1 trunc., PRAME, LAGE-1, and/or MAGE A3 refer to the proteins described in Table 1 and are explicitly intended to refer generically not only to the full-length sequences shown in Column 1 of Table A, but also, to the sequences/fragments/epitopes as described in the fourth Column of Table A. Thus, each one of the sequences shown in Column 1 of Table A, including the epitopes/fragments described in Column 4 of Table 1 can be used to generate a LAMP construct, which can then be incorporated with, for example, an IREG sequence to create a bicistronic LAMP construct.

[0362] To illustrate different, additional possible antigen combinations, but in no way limiting the disclosure, the combinations of antigens (including the sequences shown in Column 1 of Table A and/or the sequences/fragments/epitopes described in Column 4 of Table A) can be cloned into the LAMP Constructs as follows: (a) pp65 and at least one of gB, IE1, MTRII, US28, IGFBP2, IL10, UL144, UL141, US11, HOS, IE2, TERT, Survivin, Tetanus, NY-ESO-1, HER2, HER3, HVEM, HPV16E6, HPV18E6, HPV16E7, HPV18E7, EBNA1, EBNA trunc, gp350, LMP2, GCP3, Middle S, X Protein, TIGIT, TEM8, TEM1, HER2 ECD+TM, CEA, TARP, PROSTEIN, PSMA, BIRC4, MUCIN-1, MUCIN-1 iso, CD40-L, WT-1, WT-1 trunc., PRAME, LAGE-1, and/or MAGE A3; (b) gB and at least one of pp65, IE1, MTRII, US28, IGFBP2, IL10, UL144, UL141, US11, HOS, IE2, TERT, Survivin, Tetanus, NY-ESO-1, HER2, HER3, HVEM, HPV16E6, HPV18E6, HPV16E7, HPV18E7, EBNA1, EBNA trunc, gp350, LMP2, GCP3, Middle S, X Protein, TIGIT, TEM8, TEM1, HER2 ECD+TM, CEA, TARP, PROSTEIN, PSMA, BIRC4, MUCIN-1, MUCIN-1 iso, CD40-L, WT-1, WT-1 trunc., PRAME, LAGE-1, and/or MAGE A3; (c) IE1 and at least one of pp65, gB, MTRII, US28, IGFBP2, IL10, UL144, UL141, US11, HOS, IE2, TERT, Survivin, Tetanus, NY-ESO-1, HER2, HER3, HVEM, HPV16E6, HPV18E6, HPV16E7, HPV18E7, EBNA1, EBNA trunc, gp350, LMP2, GCP3, Middle S, X Protein, TIGIT, TEM8, TEM1, HER2 ECD+TM, CEA, TARP, PROSTEIN, PSMA, BIRC4, MUCIN-1, MUCIN-1 iso, CD40-L, WT-1, WT-1 trunc., PRAME, LAGE-1, and/or MAGE A3; (d) MTRII, and at least one of pp65, gB, IE1, US28, IGFBP2, IL10, UL144, UL141, US11, HOS, IE2, TERT, Survivin, Tetanus, NY-ESO-1, HER2, HER3, HVEM, HPV16E6, HPV18E6, HPV16E7, HPV18E7, EBNA1, EBNA trunc, gp350, LMP2, GCP3, Middle S, X Protein, TIGIT, TEM8, TEM1, HER2 ECD+TM, CEA, TARP, PROSTEIN, PSMA, BIRC4, MUCIN-1, MUCIN-1 iso, CD40-L, WT-1, WT-1 trunc., PRAME, LAGE-1, and/or MAGE A3; (e) US28 and at least one of pp65, gB, IE1, MTRII, IGFBP2, IL10, UL144, UL141, US11, HOS, IE2, TERT, Survivin, Tetanus, NY-ESO-1, HER2, HER3, HVEM, HPV16E6, HPV18E6, HPV16E7, HPV18E7, EBNA1, EBNA trunc, gp350, LMP2, GCP3, Middle S, X Protein, TIGIT, TEM8, TEM1, HER2 ECD+TM, CEA, TARP, PROSTEIN, PSMA, BIRC4, MUCIN-1, MUCIN-1 iso, CD40-L, WT-1, WT-1 trunc., PRAME, LAGE-1, and/or MAGE A3; (f) IGFBP2 and at least one of pp65, gB, IE1, MTRII, US28, IL10, UL144, UL141, US11, HOS, IE2, TERT, Survivin, Tetanus, NY-ESO-1, HER2, HER3, HVEM, HPV16E6, HPV18E6, HPV16E7, HPV18E7, EBNA1, EBNA trunc, gp350, LMP2, GCP3, Middle S, X Protein, TIGIT, TEM8, TEM1, HER2 ECD+TM, CEA, TARP, PROSTEIN, PSMA, BIRC4, MUCIN-1, MUCIN-1 iso, CD40-L, WT-1, WT-1 trunc., PRAME, LAGE-1, and/or MAGE A3; (g) IL10 and at least one of pp65, gB, IE1, MTRII, US28, IGFBP2, UL144, UL141, US11, HOS, IE2, TERT, Survivin, Tetanus, NY-ESO-1, HER2, HER3, HVEM, HPV16E6, HPV18E6, HPV16E7, HPV18E7, EBNA1, EBNA trunc, gp350, LMP2, GCP3, Middle S, X Protein, TIGIT, TEM8, TEM1, HER2 ECD+TM, CEA, TARP, PROSTEIN, PSMA, BIRC4, MUCIN-1, MUCIN-1 iso, CD40-L, WT-1, WT-1 trunc., PRAME, LAGE-1, and/or MAGE A3; (h) UL144 and at least one of pp65, gB, IE1, MTRII, US28, IGFBP2, IL10, UL141, US11, HOS, IE2, TERT, Survivin, Tetanus, NY-ESO-1, HER2, HER3, HVEM, HPV16E6, HPV18E6, HPV16E7, HPV18E7, EBNA1, EBNA trunc, gp350, LMP2, GCP3, Middle S, X Protein, TIGIT, TEM8, TEM1, HER2 ECD+TM, CEA, TARP, PROSTEIN, PSMA, BIRC4, MUCIN-1, MUCIN-1 iso, CD40-L, WT-1, WT-1 trunc., PRAME, LAGE-1, and/or MAGE A3; (i) UL141 and at least one of pp65, gB, IE1, MTRII, US28, IGFBP2, IL10, UL144, US11, HOS, IE2, TERT, Survivin, Tetanus, NY-ESO-1, HER2, HER3, HVEM, HPV16E6, HPV18E6, HPV16E7, HPV18E7, EBNA1, EBNA trunc, gp350, LMP2, GCP3, Middle S, X Protein, TIGIT, TEM8, TEM1, HER2 ECD+TM, CEA, TARP, PROSTEIN, PSMA, BIRC4, MUCIN-1, MUCIN-1 iso, CD40-L, WT-1, WT-1 trunc., PRAME, LAGE-1, and/or MAGE A3; (j) US11 and at least one of pp65, gB, IE1, MTRII, US28, IGFBP2, IL10, UL144, UL141, HOS, IE2, TERT, Survivin, Tetanus, NY-ESO-1, HER2, HER3, HVEM, HPV16E6, HPV18E6, HPV16E7, HPV18E7, EBNA1, EBNA trunc, gp350, LMP2, GCP3, Middle S, X Protein, TIGIT, TEM8, TEM1, HER2 ECD+TM, CEA, TARP, PROSTEIN, PSMA, BIRC4, MUCIN-1, MUCIN-1 iso, CD40-L, WT-1, WT-1 trunc., PRAME, LAGE-1, and/or MAGE A3; (k) IE2 and at least one of pp65, gB, IE1, MTRII, US28, IGFBP2, IL10, UL144, UL141, US11, HOS, TERT, Survivin, Tetanus, NY-ESO-1, HER2, HER3, HVEM, HPV16E6, HPV18E6, HPV16E7, HPV18E7, EBNA1, EBNA trunc, gp350, LMP2, GCP3, Middle S, X Protein, TIGIT, TEM8, TEM1, HER2 ECD+TM, CEA, TARP, PROSTEIN, PSMA, BIRC4, MUCIN-1, MUCIN-1 iso, CD40-L, WT-1, WT-1 trunc., PRAME, LAGE-1, and/or MAGE A3; (l) TERT and at least one of pp65, gB, IE1, MTRII, US28, IGFBP2, IL10, UL144, UL141, US11, HOS, IE2, Survivin, Tetanus, NY-ESO-1, HER2, HER3, HVEM, HPV16E6, HPV18E6, HPV16E7, HPV18E7, EBNA1, EBNA trunc, gp350, LMP2, GCP3, Middle S, X Protein, TIGIT, TEM8, TEM1, HER2 ECD+TM, CEA, TARP, PROSTEIN, PSMA, BIRC4, MUCIN-1, MUCIN-1 iso, CD40-L, WT-1, WT-1 trunc., PRAME, LAGE-1, and/or MAGE A3; (m) Survivin and at least one of pp65, gB, IE1, MTRII, US28, IGFBP2, IL10, UL144, UL141, US11, HOS, IE2, TERT, Tetanus, NY-ESO-1, HER2, HER3, HVEM, HPV16E6, HPV18E6, HPV16E7, HPV18E7, EBNA1, EBNA trunc, gp350, LMP2, GCP3, Middle S, X Protein, TIGIT, TEM8, TEM1, HER2 ECD+TM, CEA, TARP, PROSTEIN, PSMA, BIRC4, MUCIN-1, MUCIN-1 iso, CD40-L, WT-1, WT-1 trunc., PRAME, LAGE-1, and/or MAGE A3; (n) Tetanus and at least one of pp65, gB, IE1, MTRII, US28, IGFBP2, IL10, UL144, UL141, US11, HOS, IE2, TERT, Survivin, NY-ESO-1, HER2, HER3, HVEM, HPV16E6, HPV18E6, HPV16E7, HPV18E7, EBNA1, EBNA trunc, gp350, LMP2, GCP3, Middle S, X Protein, TIGIT, TEM8, TEM1, HER2 ECD+TM, CEA, TARP, PROSTEIN, PSMA, BIRC4, MUCIN-1, MUCIN-1 iso, CD40-L, WT-1, WT-1 trunc., PRAME, LAGE-1, and/or MAGE A3; (o) NY-ESO-1 and at least one of pp65, gB, IE1, MTRII, US28, IGFBP2, IL10, UL144, UL141, US11, HOS, IE2, TERT, Survivin, Tetanus, HER2, HER3, HVEM, HPV16E6, HPV18E6, HPV16E7, HPV18E7, EBNA1, EBNA trunc, gp350, LMP2, GCP3, Middle S, X Protein, TIGIT, TEM8, TEM1, HER2 ECD+TM, CEA, TARP, PROSTEIN, PSMA, BIRC4, MUCIN-1, MUCIN-1 iso, CD40-L, WT-1, WT-1 trunc., PRAME, LAGE-1, and/or MAGE A3; (p) HER2 and at least one of pp65, gB, IE1, MTRII, US28, IGFBP2, IL10, UL144, UL141, US11, HOS, IE2, TERT, Survivin, Tetanus, NY-ESO-1, HER3, HVEM, HPV16E6, HPV18E6, HPV16E7, HPV18E7, EBNA1, EBNA trunc, gp350, LMP2, GCP3, Middle S, X Protein, TIGIT, TEM8, TEM1, HER2 ECD+TM, CEA, TARP, PROSTEIN, PSMA, BIRC4, MUCIN-1, MUCIN-1 iso, CD40-L, WT-1, WT-1 trunc., PRAME, LAGE-1, and/or MAGE A3; (q) HER3 and at least one of pp65, gB, IE1, MTRII, US28, IGFBP2, IL10, UL144, UL141, US11, HOS, IE2, TERT, Survivin, Tetanus, NY-ESO-1, HER2, HVEM, HPV16E6, HPV18E6, HPV16E7, HPV18E7, EBNA1, EBNA trunc, gp350, LMP2, GCP3, Middle S, X Protein, TIGIT, TEM8, TEM1, HER2 ECD+TM, CEA, TARP, PROSTEIN, PSMA, BIRC4, MUCIN-1, MUCIN-1 iso, CD40-L, WT-1, WT-1 trunc., PRAME, LAGE-1, and/or MAGE A3; (r) HVEM and at least one of pp65, gB, IE1, MTRII, US28, IGFBP2, IL10, UL144, UL141, US11, HOS, IE2, TERT, Survivin, Tetanus, NY-ESO-1, HER2, HER3, HPV16E6, HPV18E6, HPV16E7, HPV18E7, EBNA1, EBNA trunc, gp350, LMP2, GCP3, Middle S, X Protein, TIGIT, TEM8, TEM1, HER2 ECD+TM, CEA, TARP, PROSTEIN, PSMA, BIRC4, MUCIN-1, MUCIN-1 iso, CD40-L, WT-1, WT-1 trunc., PRAME, LAGE-1, and/or MAGE A3; (s) HOS and at least one of pp65, gB, IE1, MTRII, US28, IGFBP2, IL10, UL144, UL141, US11, IE2, TERT, Survivin, Tetanus, NY-ESO-1, HER2, HER3, HVEM, HPV16E6, HPV18E6, HPV16E7, HPV18E7, EBNA1, EBNA trunc, gp350, LMP2, GCP3, Middle S, X Protein, TIGIT, TEM8, TEM1, HER2 ECD+TM, CEA, TARP, PROSTEIN, PSMA, BIRC4, MUCIN-1, MUCIN-1 iso, CD40-L, WT-1, WT-1 trunc., PRAME, LAGE-1, and/or MAGE A3; (t) HPV16E6 and at least one of pp65, gB, IE1, MTRII, US28, IGFBP2, IL10, UL144, UL141, US11, HOS, IE2, TERT, Survivin, Tetanus, NY-ESO-1, HER2, HER3, HVEM, HPV18E6, HPV16E7, HPV18E7, EBNA1, EBNA trunc, gp350, LMP2, GCP3, Middle S, X Protein, TIGIT, TEM8, TEM1, HER2 ECD+TM, CEA, TARP, PROSTEIN, PSMA, BIRC4, MUCIN-1, MUCIN-1 iso, CD40-L, WT-1, WT-1 trunc., PRAME, LAGE-1, and/or MAGE A3; (u) HPV18E6 and at least one of pp65, gB, IE1, MTRII, US28, IGFBP2, IL10, UL144, UL141, US11, HOS, IE2, TERT, Survivin, Tetanus, NY-ESO-1, HER2, HER3, HVEM, HPV16E6, HPV16E7, HPV18E7, EBNA1, EBNA trunc, gp350, LMP2, GCP3, Middle S, X Protein, TIGIT, TEM8, TEM1, HER2 ECD+TM, CEA, TARP, PROSTEIN, PSMA, BIRC4, MUCIN-1, MUCIN-1 iso, CD40-L, WT-1, WT-1 trunc., PRAME, LAGE-1, and/or MAGE A3; (v) HPV16E7 and at least one of pp65, gB, IE1, MTRII, US28, IGFBP2, IL10, UL144, UL141, US11, HOS, IE2, TERT, Survivin, Tetanus, NY-ESO-1, HER2, HER3, HVEM, HPV16E6, HPV18E6, HPV18E7, EBNA1, EBNA trunc, gp350, LMP2, GCP3, Middle S, X Protein, TIGIT, TEM8, TEM1, HER2 ECD+TM, CEA, TARP, PROSTEIN, PSMA, BIRC4, MUCIN-1, MUCIN-1 iso, CD40-L, WT-1, WT-1 trunc., PRAME, LAGE-1, and/or MAGE A3; (w) HPV18E7 and at least one of pp65, gB, IE1, MTRII, US28, IGFBP2, IL10, UL144, UL141, US11, HOS, IE2, TERT, Survivin, Tetanus, NY-ESO-1, HER2, HER3, HVEM, HPV16E6, HPV18E6, HPV16E7, EBNA1, EBNA trunc, gp350, LMP2, GCP3, Middle S, X Protein, TIGIT, TEM8, TEM1, HER2 ECD+TM, CEA, TARP, PROSTEIN, PSMA, BIRC4, MUCIN-1, MUCIN-1 iso, CD40-L, WT-1, WT-1 trunc., PRAME, LAGE-1, and/or MAGE A3; (x) EBNA1 and at least one of pp65, gB, IE1, MTRII, US28, IGFBP2, IL10, UL144, UL141, US11, HOS, IE2, TERT, Survivin, Tetanus, NY-ESO-1, HER2, HER3, HVEM, HPV16E6, HPV18E6, HPV16E7, HPV18E7, EBNA trunc, gp350, LMP2, GCP3, Middle S, X Protein, TIGIT, TEM8, TEM1, HER2 ECD+TM, CEA, TARP, PROSTEIN, PSMA, BIRC4, MUCIN-1, MUCIN-1 iso, CD40-L, WT-1, WT-1 trunc., PRAME, LAGE-1, and/or MAGE A3; (y) EBNA1 trunc and at least one of pp65, gB, IE1, MTRII, US28, IGFBP2, IL10, UL144, UL141, US11, HOS, IE2, TERT, Survivin, Tetanus, NY-ESO-1, HER2, HER3, HVEM, HPV16E6, HPV18E6, HPV16E7, HPV18E7, EBNA1, gp350, LMP2, GCP3, Middle S, X Protein, TIGIT, TEM8, TEM1, HER2 ECD+TM, CEA, TARP, PROSTEIN, PSMA, BIRC4, MUCIN-1, MUCIN-1 iso, CD40-L, WT-1, WT-1 trunc., PRAME, LAGE-1, and/or MAGE A3; (z) gp350 and at least one of pp65, gB, IE1, MTRII, US28, IGFBP2, IL10, UL144, UL141, US11, HOS, IE2, TERT, Survivin, Tetanus, NY-ESO-1, HER2, HER3, HVEM, HPV16E6, HPV18E6, HPV16E7, HPV18E7, EBNA1, EBNA trunc, LMP2, GCP3, Middle S, X Protein, TIGIT, TEM8, TEM1, HER2 ECD+TM, CEA, TARP, PROSTEIN, PSMA, BIRC4, MUCIN-1, MUCIN-1 iso, CD40-L, WT-1, WT-1 trunc., PRAME, LAGE-1, and/or MAGE A3; (aa) LMP2 and at least one of pp65, gB, IE1, MTRII, US28, IGFBP2, IL10, UL144, UL141, US11, HOS, IE2, TERT, Survivin, Tetanus, NY-ESO-1, HER2, HER3, HVEM, HPV16E6, HPV18E6, HPV16E7, HPV18E7, EBNA1, EBNA trunc, gp350, GCP3, Middle S, X Protein, TIGIT, TEM8, TEM1, HER2 ECD+TM, CEA, TARP, PROSTEIN, PSMA, BIRC4, MUCIN-1, MUCIN-1 iso, CD40-L, WT-1, WT-1 trunc., PRAME, LAGE-1, and/or MAGE A3; (ab) GCP3 and at least one of pp65, gB, IE1, MTRII, US28, IGFBP2, IL10, UL144, UL141, US11, HOS, IE2, TERT, Survivin, Tetanus, NY-ESO-1, HER2, HER3, HVEM, HPV16E6, HPV18E6, HPV16E7, HPV18E7, EBNA1, EBNA trunc, gp350, LMP2, Middle S, X Protein, TIGIT, TEM8, TEM1, HER2 ECD+TM, CEA, TARP, PROSTEIN, PSMA, BIRC4, MUCIN-1, MUCIN-1 iso, CD40-L, WT-1, WT-1 trunc., PRAME, LAGE-1, and/or MAGE A3; (ac) Middle S and at least one of pp65, gB, IE1, MTRII, US28, IGFBP2, IL10, UL144, UL141, US11, HOS, IE2, TERT, Survivin, Tetanus, NY-ESO-1, HER2, HER3, HVEM, HPV16E6, HPV18E6, HPV16E7, HPV18E7, EBNA1, EBNA trunc, gp350, LMP2, GCP3, X Protein, TIGIT, TEM8, TEM1, HER2 ECD+TM, CEA, TARP, PROSTEIN, PSMA, BIRC4, MUCIN-1, MUCIN-1 iso, CD40-L, WT-1, WT-1 trunc., PRAME, LAGE-1, and/or MAGE A3; (ad) X Protein and at least one of pp65, gB, IE1, MTRII, US28, IGFBP2, IL10, UL144, UL141, US11, HOS, IE2, TERT, Survivin, Tetanus, NY-ESO-1, HER2, HER3, HVEM, HPV16E6, HPV18E6, HPV16E7, HPV18E7, EBNA1, EBNA trunc, gp350, LMP2, GCP3, Middle S, TIGIT, TEM8, TEM1, HER2 ECD+TM, CEA, TARP, PROSTEIN, PSMA, BIRC4, MUCIN-1, MUCIN-1 iso, CD40-L, WT-1, WT-1 trunc., PRAME, LAGE-1, and/or MAGE A3; (ae) TIGIT and at least one of pp65, gB, IE1, MTRII, US28, IGFBP2, IL10, UL144, UL141, US11, HOS, IE2, TERT, Survivin, Tetanus, NY-ESO-1, HER2, HER3, HVEM, HPV16E6, HPV18E6, HPV16E7, HPV18E7, EBNA1, EBNA trunc, gp350, LMP2, GCP3, Middle S, X Protein, TEM8, TEM1, HER2 ECD+TM, CEA, TARP, PROSTEIN, PSMA, BIRC4, MUCIN-1, MUCIN-1 iso, CD40-L, WT-1, WT-1 trunc., PRAME, LAGE-1, and/or MAGE A3; (af) TEM8 and at least one of pp65, gB, IE1, MTRII, US28, IGFBP2, IL10, UL144, UL141, US11, HOS, IE2, TERT, Survivin, Tetanus, NY-ESO-1, HER2, HER3, HVEM, HPV16E6, HPV18E6, HPV16E7, HPV18E7, EBNA1, EBNA trunc, gp350, LMP2, GCP3, Middle S, X Protein, TIGIT, TEM1, HER2 ECD+TM, CEA, TARP, PROSTEIN, PSMA, BIRC4, MUCIN-1, MUCIN-1 iso, CD40-L, WT-1, WT-1 trunc., PRAME, LAGE-1, and/or MAGE A3; (ag) TEM1 and at least one of pp65, gB, IE1, MTRII, US28, IGFBP2, IL10, UL144, UL141, US11, HOS, IE2, TERT, Survivin, Tetanus, NY-ESO-1, HER2, HER3, HVEM, HPV16E6, HPV18E6, HPV16E7, HPV18E7, EBNA1, EBNA trunc, gp350, LMP2, GCP3, Middle S, X Protein, TIGIT, TEM8, HER2 ECD+TM, CEA, TARP, PROSTEIN, PSMA, BIRC4, MUCIN-1, MUCIN-1 iso, CD40-L, WT-1, WT-1 trunc., PRAME, LAGE-1, and/or MAGE A3; (ah) HER2 ECD+TM and at least one of pp65, gB, IE1, MTRII, US28, IGFBP2, IL10, UL144, UL141, US11, HOS, IE2, TERT, Survivin, Tetanus, NY-ESO-1, HER2, HER3, HVEM, HPV16E6, HPV18E6, HPV16E7, HPV18E7, EBNA1, EBNA trunc, gp350, LMP2, GCP3, Middle S, X Protein, TIGIT, TEM8, TEM1, CEA, TARP, PROSTEIN, PSMA, BIRC4, MUCIN-1, MUCIN-1 iso, CD40-L, WT-1, WT-1 trunc., PRAME, LAGE-1, and/or MAGE A3; (ai) CEA and at least one of pp65, gB, IE1, MTRII, US28, IGFBP2, IL10, UL144, UL141, US11, HOS, IE2, TERT, Survivin, Tetanus, NY-ESO-1, HER2, HER3, HVEM, HPV16E6, HPV18E6, HPV16E7, HPV18E7, EBNA1, EBNA trunc, gp350, LMP2, GCP3, Middle S, X Protein, TIGIT, TEM8, TEM1, HER2 ECD+TM, TARP, PROSTEIN, PSMA, BIRC4, MUCIN-1, MUCIN-1 iso, CD40-L, WT-1, WT-1 trunc., PRAME, LAGE-1, and/or MAGE A3; (aj) TARP and at least one of pp65, gB, IE1, MTRII, US28, IGFBP2, IL10, UL144, UL141, US11, HOS, IE2, TERT, Survivin, Tetanus, NY-ESO-1, HER2, HER3, HVEM, HPV16E6, HPV18E6, HPV16E7, HPV18E7, EBNA1, EBNA trunc, gp350, LMP2, GCP3, Middle S, X Protein, TIGIT, TEM8, TEM1, HER2 ECD+TM, CEA, PROSTEIN, PSMA, BIRC4, MUCIN-1, MUCIN-1 iso, CD40-L, WT-1, WT-1 trunc., PRAME, LAGE-1, and/or MAGE A3; (ak) PROSTEIN and at least one of pp65, gB, IE1, MTRII, US28, IGFBP2, IL10, UL144, UL141, US11, HOS, IE2, TERT, Survivin, Tetanus, NY-ESO-1, HER2, HER3, HVEM, HPV16E6, HPV18E6, HPV16E7, HPV18E7, EBNA1, EBNA trunc, gp350, LMP2, GCP3, Middle S, X Protein, TIGIT, TEM8, TEM1, HER2 ECD+TM, CEA, TARP, PSMA, BIRC4, MUCIN-1, MUCIN-1 iso, CD40-L, WT-1, WT-1 trunc., PRAME, LAGE-1, and/or MAGE A3; (al) PSMA and at least one of pp65, gB, IE1, MTRII, US28, IGFBP2, IL10, UL144, UL141, US11, HOS, IE2, TERT, Survivin, Tetanus, NY-ESO-1, HER2, HER3, HVEM, HPV16E6, HPV18E6, HPV16E7, HPV18E7, EBNA1, EBNA trunc, gp350, LMP2, GCP3, Middle S, X Protein, TIGIT, TEM8, TEM1, HER2 ECD+TM, CEA, TARP, PROSTEIN, BIRC4, MUCIN-1, MUCIN-1 iso, CD40-L, WT-1, WT-1 trunc., PRAME, LAGE-1, and/or MAGE A3; (am) BIRC4 and at least one of pp65, gB, IE1, MTRII, US28, IGFBP2, IL10, UL144, UL141, US11, HOS, IE2, TERT, Survivin, Tetanus, NY-ESO-1, HER2, HER3, HVEM, HPV16E6, HPV18E6, HPV16E7, HPV18E7, EBNA1, EBNA trunc, gp350, LMP2, GCP3, Middle S, X Protein, TIGIT, TEM8, TEM1, HER2 ECD+TM, CEA, TARP, PROSTEIN, PSMA, MUCIN-1, MUCIN-1 iso, CD40-L, WT-1, WT-1 trunc., PRAME, LAGE-1, and/or MAGE A3; (an) MUCIN-1 and at least one of pp65, gB, IE1, MTRII, US28, IGFBP2, IL10, UL144, UL141, US11, HOS, IE2, TERT, Survivin, Tetanus, NY-ESO-1, HER2, HER3, HVEM, HPV16E6, HPV18E6, HPV16E7, HPV18E7, EBNA1, EBNA trunc, gp350, LMP2, GCP3, Middle S, X Protein, TIGIT, TEM8, TEM1, HER2 ECD+TM, CEA, TARP, PROSTEIN, PSMA, BIRC4, MUCIN-1 iso, CD40-L, WT-1, WT-1 trunc., PRAME, LAGE-1, and/or MAGE A3; (ao) MUCIN-1 iso and at least one of pp65, gB, IE1, MTRII, US28, IGFBP2, IL10, UL144, UL141, US11, HOS, IE2, TERT, Survivin, Tetanus, NY-ESO-1, HER2, HER3, HVEM, HPV16E6, HPV18E6, HPV16E7, HPV18E7, EBNA1, EBNA trunc, gp350, LMP2, GCP3, Middle S, X Protein, TIGIT, TEM8, TEM1, HER2 ECD+TM, CEA, TARP, PROSTEIN, PSMA, BIRC4, MUCIN-1, CD40-L, WT-1, WT-1 trunc., PRAME, LAGE-1, and/or MAGE A3; (ap) CD40-L and at least one of pp65, gB, IE1, MTRII, US28, IGFBP2, IL10, UL144, UL141, US11, HOS, IE2, TERT, Survivin, Tetanus, NY-ESO-1, HER2, HER3, HVEM, HPV16E6, HPV18E6, HPV16E7, HPV18E7, EBNA1, EBNA trunc, gp350, LMP2, GCP3, Middle S, X Protein, TIGIT, TEM8, TEM1, HER2 ECD+TM, CEA, TARP, PROSTEIN, PSMA, BIRC4, MUCIN-1, MUCIN-1 iso, WT-1, WT-1 trunc., PRAME, LAGE-1, and/or MAGE A3; (aq) WT-1 and at least one of pp65, gB, IE1, MTRII, US28, IGFBP2, IL10, UL144, UL141, US11, HOS, IE2, TERT, Survivin, Tetanus, NY-ESO-1, HER2, HER3, HVEM, HPV16E6, HPV18E6, HPV16E7, HPV18E7, EBNA1, EBNA trunc, gp350, LMP2, GCP3, Middle S, X Protein, TIGIT, TEM8, TEM1, HER2 ECD+TM, CEA, TARP, PROSTEIN, PSMA, BIRC4, MUCIN-1, MUCIN-1 iso, CD40-L, WT-1 trunc., PRAME, LAGE-1, and/or MAGE A3; (ar) WT-1 trunc and at least one of pp65, gB, IE1, MTRII, US28, IGFBP2, IL10, UL144, UL141, US11, HOS, IE2, TERT, Survivin, Tetanus, NY-ESO-1, HER2, HER3, HVEM, HPV16E6, HPV18E6, HPV16E7, HPV18E7, EBNA1, EBNA trunc, gp350, LMP2, GCP3, Middle S, X Protein, TIGIT, TEM8, TEM1, HER2 ECD+TM, CEA, TARP, PROSTEIN, PSMA, BIRC4, MUCIN-1, MUCIN-1 iso, CD40-L, WT-1, PRAME, LAGE-1, and/or MAGE A3; (as) PRAME and at least one of pp65, gB, IE1, MTRII, US28, IGFBP2, IL10, UL144, UL141, US11, HOS, IE2, TERT, Survivin, Tetanus, NY-ESO-1, HER2, HER3, HVEM, HPV16E6, HPV18E6, HPV16E7, HPV18E7, EBNA1, EBNA trunc, gp350, LMP2, GCP3, Middle S, X Protein, TIGIT, TEM8, TEM1, HER2 ECD+TM, CEA, TARP, PROSTEIN, PSMA, BIRC4, MUCIN-1, MUCIN-1 iso, CD40-L, WT-1, WT-1 trunc., LAGE-1, and/or MAGE A3; (at) LAGE-1 and at least one of pp65, gB, IE1, MTRII, US28, IGFBP2, IL10, UL144, UL141, US11, HOS, IE2, TERT, Survivin, Tetanus, NY-ESO-1, HER2, HER3, HVEM, HPV16E6, HPV18E6, HPV16E7, HPV18E7, EBNA1, EBNA trunc, gp350, LMP2, GCP3, Middle S, X Protein, TIGIT, TEM8, TEM1, HER2 ECD+TM, CEA, TARP, PROSTEIN, PSMA, BIRC4, MUCIN-1, MUCIN-1 iso, CD40-L, WT-1, WT-1 trunc., PRAME, and/or MAGE A3; and/or (au) MAGE A3 and at least one of pp65, gB, IE1, MTRII, US28, IGFBP2, IL10, UL144, UL141, US11, HOS, IE2, TERT, Survivin, Tetanus, NY-ESO-1, HER2, HER3, HVEM, HPV16E6, HPV18E6, HPV16E7, HPV18E7, EBNA1, EBNA trunc, gp350, LMP2, GCP3, Middle S, X Protein, TIGIT, TEM8, TEM1, HER2 ECD+TM, CEA, TARP, PROSTEIN, PSMA, BIRC4, MUCIN-1, MUCIN-1 iso, CD40-L, WT-1, WT-1 trunc., PRAME, and/or LAGE-1. The order of the combination of antigens as described above in a particular LAMP construct can vary as this list describes what a LAMP construct comprises and not necessarily to describe the arrangement of the antigens within a particular construct. Moreover, it is specifically envisioned that these antigens can be combined within a single LAMP construct, or can be delivered in a composition comprising multiple LAMP constructs.

[0363] Additional examples of antigens that may be used in the bicistronic LAMP constructs herein include those disclosed, for example, in international publication WO 2018/204534, such as in Table 1 and FIGS. 19-20 of that publication, or in international publication WO 2021/077051, such as in Table 1 and FIG. 11A of that publication. Both of these publications are incorporated herein by reference in their entireties.

[0364] In some cases the antigen used in the bicistronic LAMP constructs comprises a pp65 antigen, such as comprising SEQ ID NO: 291, 292, or 293, or one or more of the portions of SEQ ID NO: 291 shown in column 4 of Table A. In come cases, the antigen comprises SEQ ID NO: 292 or 293. In some cases the antigen used in the bicistronic LAMP constructs comprises a gB antigen, such as comprising SEQ ID NO: 294, 295, 296, or 297, or one or more of the antigen fragments from SEQ ID NO: 294 shown in column 4 of Table A. In come cases, the antigen comprises SEQ ID NO: 296 or 297. In some cases the antigen used in the bicistronic LAMP constructs comprises a 1E1 antigen, such as comprising SEQ ID NO: 298, 299, or 300, or one of more of the 1E1 polypeptide sequences shown in column 4 of Table A. In some cases, the antigen comprises SEQ ID NO: 299 or 300. In some cases, the antigen comprises more than one of a pp65, gB, and 1E1 antigen sequence, for example, joined by one or more linker peptide sequences, such as those shown in column 4 of Table A. In some cases, the antigen comprises each of a pp65, gB, and 1E1 antigen sequence, such as sequences selected from a set of antigen sequences (a) comprising SEQ ID NOs: 292 or 293, (b) comprising SEQ ID NOs: 296 or 297, and (c) comprising SEQ ID NOs: 299 or 300. Polynucleotide coding sequences for such pp65, gB, and 1E1 antigens, for example, may be used in a bicistronic LAMP construct along with an IREG protein coding sequence. For example, such constructs, in polypeptide, polynucleotide (i.e. DNA vector or self-replicating RNA vector), or cellular form may be used for treatment of a variety of cancers, such as those listed above, including, for example, cases in which the cancer (including all stages of progression, including hyperplasia) is an adenocarcinoma, sarcoma, skin cancer, melanoma, bladder cancer, brain cancer, breast cancer, uterine cancer, ovarian cancer, prostate cancer, lung cancer (including, but not limited to NSCLC, SCLC, squamous cell cancer), colorectal cancer, anal cancer, rectal cancer, cervical cancer, liver cancer, head and neck cancer, oral cancer, salivary gland cancer, esophageal cancer, pancreas cancer, pancreatic ductal adenocarcinoma (PDA), renal cancer, stomach cancer, kidney cancer, multiple myeloma or cerebral cancer. In some cases, the cancer is glioblastoma multiforme. In some cases, the cancer is breast cancer. In some cases, the cancer is prostate cancer. In some cases, the cancer is head and neck cancer. In some cases, the cancer is colorectal cancer.

[0365] In other cases, the antigen comprises a Large T antigen, such as comprising the amino acid sequence of SEQ ID NO: 254, 255, or 256. In some cases, the antigen comprises the amino acid sequence of SEQ ID NO: 255 or SEQ ID NO: 256. In some cases, the LAMP-antigen construct within the bicistronic LAMP construct comprises the amino acid sequence of SEQ ID NO: 879 or SEQ ID NO: 880, both of which comprise the amino acid sequence of SEQ ID NO: 256 flanked by the homology domains of LAMP1, and including a signal sequence. SEQ ID NO: 879 further comprises a LAMP transmembrane domain and cytoplasmic region. In bicistronic LAMP constructs herein, the constructs may further comprise or encode an IREG protein. Constructs in which the antigen is a Large T antigen, for example, may be used in treatment of cancer, such as skin cancer, such as Merkel cell carcinoma. Such antigens may be combined with an IREG as a second polypeptide, examples of which are provided below and elsewhere in the disclosure.

### E. Exemplary Immune Response Enhancing-Genes (IREGs) for Use in Bicistronic LAMP Constructs

[0366] In some embodiments, the second polypeptide may include a domain or antigen encoded by an immune response enhancing-gene (IREG), which may increase T cell response and/or antibody response to the bicistronic LAMP-antigen construct. Examples of IREG polypeptides include, for example, CD40L, CD80, OX40, Flt3L, GM-CSF, IL-12, IL-21, IL-23, IL-15, CD70, CD86, IL-7, IL-18, IL-33, GM-CSF, 4-1BB, 4-1BBL, IL-27, or CCL20.

### 1. CD40 Ligand (CD40L)

[0367] In some embodiments, the IREG is CD40L. CD40L is a transmembrane protein expressed on the surface of activated T cells, particularly CD4 T cells. CD40L stimulates CD40-dependent activation of antigen-presenting cells (APCs), such as dendritic cells (DCs) and macrophages, as well as B cells for enhancing T cell and antibody responses. In some embodiments, the CD40L is a soluble version of CD40L (sCD40L). In some embodiments, the sCD40L is a 4-trimer, i.e., a protein complex comprising a tetramer of trimers of CD40L. In some embodiments, the sCD40L is more soluble and/or has better secretion than native CD40L. Examples of such CD40L sequences include, but are not limited to an amino acid sequence at least 60%, at least 70%, at least 75%, at least 80%, at least 85%, at least 90%, at least 95%, at least 96%, at least 97%, at least 98%, at least 99%, or 100% sequence identity of SEQ ID NO: 204.

[0368] In some cases, the sCD40L is fused to another polypeptide, such as SPD. In some embodiments, the bicistronic construct comprises a second polynucleotide encoding an amino acid sequence at least 60%, at least 70%, at least 75%, at least 80%, at least 85%, at least 90%, at least 95%, at least 96%, at least 97%, at least 98%, or at least 99% or 100% sequence identity of SEQ ID NO: 196, 233, or 238, or a combination of SEQ ID NO: 131 or 133 followed by SEQ ID NO: 204. In some embodiments, the bicistronic construct comprises a second polynucleotide encoding an amino acid sequence at least 60%, at least 70%, at least 75%, at least 80%, at least 85%, at least 90%, at least 95%, at least 96%, at least 97%, at least 98%, or at least 99% or with 100% sequence identity of SEQ ID NO: 196, 233, or 238, or a combination of SEQ ID NO: 131 or 133 followed by SEQ ID NO: 204. In some cases, the coding sequence for the second polypeptide comprises a nucleotide sequence at least 60%, at least 70%, at least 75%, at least 80%, at least 85%, at least 90%, at least 95%, at least 96%, at least 97%, at least 98%, or at least 99% or with 100% sequence identity of SEQ ID NO: 239 or 237 or 205.

### 2. FLT3L

[0369] In some embodiments, the IREG is FLT3L. Examples of such FLT3L sequences include, but are not limited to an amino acid sequence at least 60%, at least 70%, at least 75%, at least 80%, at least 85%, at least 90%, at least 95%, at least 96%, at least 97%, at least 98%, at least 99%, or 100% sequence identity of SEQ ID NO: 151 or 209.

[0370] In some embodiments, the bicistronic construct encodes a second polypeptide that includes a human Flt3L polypeptide preceded by an SPD polypeptide, thus creating a fusion protein. In some such cases, the bicistronic construct encodes a second polypeptide with an amino acid sequence at least 60%, at least 70%, at least 75%, at least 80%, at least 85%, at least 90%, at least 95%, at least 96%, at least 97%, at least 98%, or at least 99% or with 100% sequence identity of SEQ ID NO: 207.

### 3. IL-12

[0371] In some embodiments, the IREG is IL-12. Examples of such IL-12 sequences include, but are not limited to an amino acid sequence at least 60%, at least 70%, at least 75%, at least 80%, at least 85%, at least 90%, at least 95%, at least 96%, at least 97%, at least 98%, at least 99%, or 100% sequence identity of SEQ ID NO: 137, 139, 143, 145, 147, 149, 187, 189, 193, or 213.

[0372] In some embodiments, the nucleotide coding sequence for the IL-12 comprises a polynucleotide sequence with at least 60%, at least 70%, at least 75%, at least 80%, at least 85%, at least 90%, at least 95%, at least 96%, at least 97%, at least 98%, or at least 99% or 100% sequence identity of SEQ ID NO: 138, 140, 144, 146, 148, 150, 188, 190, 194, or 214.

### 4. IL-21

[0373] In some embodiments, the IREG is IL-21. Examples of such IL-21 sequences include, but are not limited to an amino acid sequence at least 60%, at least 70%, at least 75%, at least 80%, at least 85%, at least 90%, at least 95%, at least 96%, at least 97%, at least 98%, at least 99%, or 100% sequence identity of SEQ ID NO: 179, 181, or 217.

[0374] In some embodiments, the nucleotide coding sequence for the IL-21 comprises a polynucleotide sequence with at least 60%, at least 70%, at least 75%, at least 80%, at least 85%, at least 90%, at least 95%, at least 96%, at least 97%, at least 98%, or at least 99% or 100% sequence identity of SEQ ID NO: 180, 182, or 218.

### 5. OX40 Ligand (OX40L)

[0375] In some embodiments, the IREG is OX40L. Examples of such OX40L sequences include, but are not limited to an amino acid sequence at least 60%, at least 70%, at least 75%, at least 80%, at least 85%, at least 90%, at least 95%, at least 96%, at least 97%, at least 98%, at least 99%, or 100% sequence identity of SEQ ID NO: 153, 155, or 243. In some cases, the OX40L is fused to a heterologous signal peptide, such as that from IL-2. In some cases, the OX40L sequence is an extracellular domain sequence. In some cases, the OX40L extracellular domain is also fused to an Fc domain of an immunoglobulin. In some cases, the bicistronic construct comprises a second polynucleotide encoding an amino acid sequence at least 60%, at least 70%, at least 75%, at least 80%, at least 85%, at least 90%, at least 95%, at least 96%, at least 97%, at least 98%, or at least 99% or with 100% sequence identity of SEQ ID NO: 242 or a combination of SEQ ID NO: 246 or 248 followed by SEQ ID NO: 243.

### 6. IL-15

[0376] In some embodiments, the IREG is IL-15. Examples of such IL-15 sequences include, but are not limited to an amino acid sequence at least 60%, at least 70%, at least 75%, at least 80%, at least 85%, at least 90%, at least 95%, at least 96%, at least 97%, at least 98%, at least 99%, or 100% sequence identity of SEQ ID NO: 167 or 169. In some embodiments, the nucleotide coding sequence for the IL-15 comprises a polynucleotide sequence with at least 60%, at least 70%, at least 75%, at least 80%, at least 85%, at least 90%, at least 95%, at least 96%, at least 97%, at least 98%, or at least 99% or 100% sequence identity of SEQ ID NO: 168 or 170.

[0377] In some cases, the IL-15 is expressed behind a heterologous signal sequence, such as IgKVIII or Ig-kappa. Examples of such IL-15 sequences include, but are not limited to an amino acid sequence at least 60%, at least 70%, at least 75%, at least 80%, at least 85%, at least 90%, at least 95%, at least 96%, at least 97%, at least 98%, at least 99%, or 100% sequence identity of SEQ ID NO: 225. In some embodiments, the nucleotide coding sequence for the IL-15 comprises a polynucleotide sequence with at least 60%, at least 70%, at least 75%, at least 80%, at least 85%, at least 90%, at least 95%, at least 96%, at least 97%, at least 98%, or at least 99% or 100% sequence identity of SEQ ID NO: 226.

### 7. CD80

[0378] In some embodiments, the IREG is CD80. Examples of such CD80 sequences include, but are not limited to an amino acid sequence at least 60%, at least 70%, at least 75%, at least 80%, at least 85%, at least 90%, at least 95%, at least 96%, at least 97%, at least 98%, at least 99%, or 100% sequence identity of SEQ ID NO: 157, 159, or 253. In some embodiments, the nucleotide coding sequence for the CD80 comprises a polynucleotide sequence with at least 60%, at least 70%, at least 75%, at least 80%, at least 85%, at least 90%, at least 95%, at least 96%, at least 97%, at least 98%, or at least 99% or 100% sequence identity of SEQ ID NO: 158 or 160 or 254.

[0379] In some cases, the CD80 is expressed behind a heterologous signal sequence, such as IL-2 signal sequence. In some cases, the CD80 is an extracellular domain of CD80. In some cases, the extracellular domain of CD80 is further fused to the Fc domain of an immunoglobulin. Examples of such sequences include, but are not limited to an amino acid sequence at least 60%, at least 70%, at least 75%, at least 80%, at least 85%, at least 90%, at least 95%, at least 96%, at least 97%, at least 98%, at least 99%, or 100% sequence identity of SEQ ID NO: 252 or 253.

### F. Exemplary Bicistronic LAMP Construct Sequences

[0380] In some embodiments, the bicistronic construct comprises a polynucleotide sequence that encodes a LAMP-antigen polypeptide comprising two homology domains of a luminal domain of a LAMP protein, and an antigenic domain heterologous to the LAMP protein, wherein the antigenic domain is placed between the two homology domains. In some cases, the first homology domain of LAMP comprises a polypeptide sequence with at least 90%, at least 95%, at least 96%, at least 97%, at least 98%, at least 99%, or with 100% sequence identity of residues 29 to the C-terminal of SEQ ID NO: 198 or residues 29-194 of SEQ ID NO: 1. In some cases, the second homology domain of LAMP comprises a polypeptide sequence with at least 90%, at least 95%, at least 96%, at least 97%, at least 98%, at least 99%, or with 100% sequence identity of SEQ ID NO: 202 or residues 228-381 of SEQ ID NO: 1.

[0381] In some embodiments, the bicistronic construct comprises a polynucleotide sequence with at least 60%, at least 70%, at least 75%, at least 80%, at least 85%, at least 90%, at least 95%, at least 96%, at least 97%, at least 98%, at least 99%, or with 100% sequence identity of SEQ ID NO: 230.

[0382] In some embodiments, the bicistronic construct comprises a polynucleotide sequence with at least 60%, at least 70%, at least 75%, at least 80%, at least 85%, at least 90%, at least 95%, at least 96%, at least 97%, at least 98%, at least 99%, or with 100% sequence identity of SEQ ID NO: 228.

[0383] In some embodiments, the bicistronic construct comprises a polynucleotide sequence with at least 60%, at least 70%, at least 75%, at least 80%, at least 85%, at least 90%, at least 95%, at least 96%, at least 97%, at least 98%, at least 99%, or with 100% sequence identity of SEQ ID NO: 197.

[0384] In some embodiments, the bicistronic construct comprises a polynucleotide sequence with at least 60%, at least 70%, at least 75%, at least 80%, at least 85%, at least 90%, at least 95%, at least 96%, at least 97%, at least 98%, at least 99%, or with 100% sequence identity of SEQ ID NO: 208.

[0385] In some embodiments, the bicistronic construct comprises a polynucleotide sequence with at least 60%, at least 70%, at least 75%, at least 80%, at least 85%, at least 90%, at least 95%, at least 96%, at least 97%, at least 98%, at least 99%, or with 100% sequence identity of SEQ ID NO: 212.

[0386] In some embodiments, the bicistronic construct comprises a polynucleotide sequence with at least 60%, at least 70%, at least 75%, at least 80%, at least 85%, at least 90%, at least 95%, at least 96%, at least 97%, at least 98%, at least 99%, or with 100% sequence identity of SEQ ID NO: 216.

[0387] In some embodiments, the bicistronic construct comprises a polynucleotide sequence with at least 60%, at least 70%, at least 75%, at least 80%, at least 85%, at least 90%, at least 95%, at least 96%, at least 97%, at least 98%, at least 99%, or with 100% sequence identity of SEQ ID NO: 222.

[0388] In some embodiments, the bicistronic construct comprises a polynucleotide sequence with at least 60%, at least 70%, at least 75%, at least 80%, at least 85%, at least 90%, at least 95%, at least 96%, at least 97%, at least 98%, at least 99%, or with 100% sequence identity of SEQ ID NO: 241.

[0389] In some embodiments, the bicistronic construct comprises a polynucleotide sequence with at least 60%, at least 70%, at least 75%, at least 80%, at least 85%, at least 90%, at least 95%, at least 96%, at least 97%, at least 98%, at least 99%, or with 100% sequence identity of SEQ ID NO: 251.

[0390] In some embodiments, the bicistronic construct comprises a polynucleotide sequence with at least 60%, at least 70%, at least 75%, at least 80%, at least 85%, at least 90%, at least 95%, at least 96%, at least 97%, at least 98%, at least 99%, or with 100% sequence identity of SEQ ID NO: 235.

### G. Assembly of Sequences Encoding Bicistronic LAMP Constructs

[0391] Procedures for constructing bicistronic LAMP constructs comprising the antigen of interest are well known in the art (see e.g., Williams, et al., J. Cell Biol. 111:955, 1990). DNA sequences encoding the desired segments can be obtained from readily available recombinant DNA materials such as those available from the American Type Culture Collection, 12301 Parklawn Drive, Rockville, Md. 20852, U.S.A., or from DNA libraries that contain the desired DNA.

[0392] For example, the DNA segments corresponding to the desired domain sequences can be assembled with appropriate control and signal sequences using routine procedures of recombinant DNA methodology. See, e.g., as described in U.S. Pat. No. 4,593,002, and Langford, et al., Molec. Cell. Biol. 6:3191, 1986.

[0393] A DNA sequence encoding a protein or polypeptide can be synthesized chemically or isolated by one of several approaches. The DNA sequence to be synthesized can be designed with the appropriate codons for the desired amino acid sequence. In general, one will select preferred codons for the intended host in which the sequence will be used for expression. The complete sequence may be assembled from overlapping oligonucleotides prepared by standard methods and assembled into a complete coding sequence. See, e.g., Edge, Nature 292:756, 1981; Nambair, et al. Science 223:1299, 1984; Jay, et al., J. Biol. Chem. 259:6311, 1984.

[0394] In one aspect, one or more of the polynucleotides encoding the domain sequences of a bicistronic LAMP construct are isolated individually using the polymerase chain reaction (M. A. Innis, et al., In PCR Protocols: A Guide to Methods and Applications, Academic Press, 1990). The domains are preferably isolated from publicly available clones known to contain them, but they may also be isolated from genomic DNA or cDNA libraries. Preferably, isolated fragments are bordered by compatible restriction endonuclease sites which allow a bicistronic LAMP construct encoding the antigen sequence to be constructed. This technique is well known to those of skill in the art. Domain sequences may be fused directly to each other (e.g., with no intervening sequences), or inserted into one another (e.g., where domain sequences are discontinuous), or may be separated by intervening sequences (e.g., such as linker sequences).

[0395] The basic strategies for preparing oligonucleotide primers, probes and DNA libraries, as well as their screening by nucleic acid hybridization, are well known to those of ordinary skill in the art. See, e.g., Sambrook, et al., 1989, supra; Perbal, 1984, supra. The construction of an appropriate genomic DNA or cDNA library is within the skill of the art. See, e.g., Perbal, 1984, supra. Alternatively, suitable DNA libraries or publicly available clones are available from suppliers of biological research materials, such as Clonetech and Stratagene, as well as from public depositories such as the American Type Culture Collection.

[0396] Selection may be accomplished by expressing sequences from an expression library of DNA and detecting the expressed peptides immunologically. Clones which express peptides that bind to MHC II molecules and to the desired antibodies/T cell receptors are selected. These selection procedures are well known to those of ordinary skill in the art (see, e.g., Sambrook, et al., 1989, supra).

[0397] Once a clone containing the coding sequence for the desired polypeptide sequence has been prepared or isolated, the sequence can be cloned into any suitable vector, preferably comprising an origin of replication for maintaining the sequence in a host cell.

### H. Nucleic Acid Delivery Vehicles

[0398] In one aspect, the disclosure provides a nucleic acid molecule (e.g. a plasmid or vector) comprising (i) a first polynucleotide sequence encoding an antigen as described herein fused in between a first homology domain of a LAMP protein and a second homology domain of a LAMP protein (or at least between two Cysteine Conserved Fragments), for example the at least one antigen of interest may be placed in, or may replace, the LAMP hinge region); and (ii) a second polynucleotide sequence encoding at least one IREG or further antigen operably linked to a secretion signal sequence, wherein the IREG or further antigen is secreted into the circulation of the subject. Further exemplary nucleic acid embodiments are described in the Summary and claims sections and throughout the disclosure herein.

[0399] The nucleic acid molecule can be provided as a vaccine composition and introduced into a cell. The cell may be a host cell for replicating the nucleic acid molecule or for expressing the bicistronic LAMP construct (providing the LAMP-antigen Construct) and the IREG or second antigen operably linked to a secretion signal sequence (such that a second polypeptide comprising the IREG or second antigen is secreted from the cell). Preferably, the host cell is an antigen presenting cell (described further below). In some embodiments, the vaccine comprises DNA, mRNA, or self-amplifying RNA.

[0400] In some embodiments, the first polynucleotide sequence encoding the LAMP-antigen Construct further comprises a polynucleotide sequence for insertion into a target cell and an expression control sequence operably linked thereto to control expression of the first polynucleotide sequence (e.g., transcription and/or translation) in the cell. Similarly, in some embodiments, the second polynucleotide sequence encoding the second polypeptide comprising the IREG or further antigen further comprises a polynucleotide sequence for insertion into a target cell and an expression control sequence operably linked thereto to control expression of the second polynucleotide sequence (e.g., transcription and/or translation) in the cell. The nucleic acid molecule comprising the first and second polynucleotide sequences may be provided as, for example, a plasmid, phage, autonomously replicating sequence (ARS), centromeres, and other sequences which are able to replicate or be replicated in vitro or in a host cell (e.g., such as a bacterial, yeast, or insect cell) and/or target cell (e.g., such as a mammalian cell, preferably an antigen presenting cell) and/or to convey the sequences expressed to a desired location within the target cell.

[0401] Recombinant expression vectors may be derived from micro-organisms which readily infect animals, including man, horses, cows, pigs, llamas, giraffes, dogs, cats or chickens. Certain vectors herein include those which have already been used as live vaccines, such as vaccinia. These recombinants can be directly inoculated into a host, conferring immunity not only to the microbial vector, but also to express foreign antigens. Some vectors contemplated herein as live recombinant vaccines include RNA viruses, adenovirus, herpesviruses, poliovirus, and vaccinia and other pox viruses, as taught in Flexner, Adv. Pharmacol. 21:51, 1990, for example.

[0402] Expression control sequences include, but are not limited to, promoter sequences to bind RNA polymerase, enhancer sequences or negative regulatory elements to bind to transcriptional activators and repressors, respectively, and/or translation initiation sequences for ribosome binding. For example, a bacterial expression vector can include a promoter such as the lac promoter and for transcription initiation, the Shine-Dalgarno sequence and the start codon AUG (Sambrook, et al., 1989, supra). Similarly, a eukaryotic expression vector preferably includes a heterologous, homologous, or chimeric promoter for RNA polymerase II, a downstream polyadenylation signal, the start codon AUG, and a termination codon for detachment of a ribosome.

[0403] Expression control sequences may be obtained from naturally occurring genes or may be designed. Designed expression control sequences include, but are not limited to, mutated and/or chimeric expression control sequences or synthetic or cloned consensus sequences. Vectors that contain both a promoter and a cloning site into which a polynucleotide can be operatively linked are well known in the art. Such vectors are capable of transcribing RNA in vitro or in vivo, and are commercially available from sources such as Stratagene (La Jolla, Calif.) and Promega Biotech (Madison, Wis.).

[0404] In order to optimize expression and/or transcription, it may be necessary to remove, add or alter 5′ and/or 3′ untranslated portions of the vectors to eliminate extra, or alternative translation initiation codons or other sequences that may interfere with, or reduce, expression, either at the level of transcription or translation. Alternatively, consensus ribosome binding sites can be inserted immediately 5′ of the start codon to enhance expression. A wide variety of expression control sequences—sequences that control the expression of a polynucleotide sequence operatively linked to it—may be used in these vectors to express the polynucleotide sequences of this disclosure. Such useful expression control sequences include, for example, the early or late promoters of SV40, CMV, vaccinia, polyoma, adenovirus, herpes virus and other sequences known to control the expression of genes of mammalian cells, and various combinations thereof.

[0405] The first and second polynucleotide sequences (encoding the LAMP-antigen Construct and the second polypeptide) may be expressed from the same or different expression control sequences. For example, a single promoter may be used for transcription of a bicistronic mRNA molecule encoding both polypeptides, or different promoters may be used to control expression of the two different polypeptides. Those skilled in the art will be aware that translation of the “second” of the encoded proteins may be achieved by the inclusion of a translation-enhancing element such as an internal ribosome entry site (IRES) (Plank et al., Wiley Interdiscip. Rev. RNA 3:195-212, 2012) or an unstructured junction sequence to achieve post-termination re-initiation of translation (Onishi et al., G3 (Bethesda) 6 (12): 4115-4125, 2016). However, in some embodiments, the polynucleotide sequences encoding the two polypeptides are expressed from different expression control sequences (e.g., different promoters).

[0406] In order to achieve secretion of the second polynucleotide, its coding sequence may include a polynucleotide sequence encoding a secretion signal sequence (also known as a leader sequence) typically 16-30 amino acids in length, so that expression of the second polynucleotide sequence being operably linked to the secretion signal sequence. Those skilled in the art are well aware of suitable secretion signal sequences and include, for example, the signal sequence of interleukin-2, CD5, the Immunoglobulin Kappa light chain (hereinafter referred to as the Ig-kappa leader), trypsinogen, serum albumin, and prolactin (Stern et al., Trends Cell Mol. Biol. 2:1-17, 2007; Kober et al., Biotechnol. Bioengin. 110:1164-1173, 2013). The secretion signal sequence may, in some cases, be a secretion signal sequence that is “native” to the IREG or second polypeptide antigen.

[0407] In one aspect, the nucleic acid molecule comprises an origin of replication for replication. Preferably, the origin functions in at least one type of host cell which can be used to generate sufficient numbers of copies of the sequence for use in delivery to a target cell. Suitable origins therefore include, but are not limited to, those which function in bacterial cells (e.g., such as Escherichia sp., Salmonella sp., Proteus sp., Clostridium sp., Klebsiella sp., Bacillus sp., Streptomyces sp., and Pseudomonas sp.), yeast (e.g., such as Saccharomyces sp. or Pichia sp.), insect cells, and mammalian cells. In one aspect, an origin of replication is provided which functions in the target cell into which the nucleic acid delivery vehicle is introduced (e.g., a mammalian cell, such as a human cell). In another aspect, at least two origins of replication are provided, one that functions in a host cell and one that functions in a target cell.

[0408] The nucleic acid molecule may alternatively, or additionally, comprise a polynucleotide sequence(s) to facilitate integration of at least a portion of the nucleic acid molecule (e.g., delivery vector) into a target cell chromosome. For example, the nucleic acid molecule may comprise regions of homology to target cell chromosomal DNA. In one aspect, the nucleic acid molecule is provided as a delivery vector which comprises two or more recombination sites which flank a nucleic acid sequence encoding the LAMP-antigen construct and the second polypeptide, and/or the bicistronic LAMP construct itself.

[0409] The vector may additionally comprise a detectable and/or selectable marker to verify that the vector has been successfully introduced in a target cell and/or can be expressed by the target cell. These markers can encode an activity, such as, but not limited to, production of RNA, peptide, or protein, or can provide a binding site for RNA, peptides, proteins, inorganic and organic compounds or compositions and the like.

[0410] Examples of detectable/selectable markers genes include, but are not limited to: DNA segments that encode products which provide resistance against otherwise toxic compounds (e.g., antibiotics); DNA segments that encode products which are otherwise lacking in the recipient cell (e.g., tRNA genes, auxotrophic markers); DNA segments that encode products which suppress the activity of a gene product; DNA segments that encode products which can be readily identified (e.g., phenotypic markers such as beta-galactosidase, a fluorescent protein (GFP, CFP, YFG, BFP, RFP, EGFP, EYFP, EBFP, dsRed, mutated, modified, or enhanced forms thereof, and the like), and cell surface proteins); DNA segments that bind products which are otherwise detrimental to cell survival and/or function; DNA segments that otherwise inhibit the activity of other nucleic acid segments (e.g., antisense oligonucleotides); DNA segments that bind products that modify a substrate (e.g., restriction endonucleases); DNA segments that can be used to isolate or identify a desired molecule (e.g., segments encoding specific protein binding sites); primer sequences; DNA segments, which when absent, directly or indirectly confer resistance or sensitivity to particular compounds; and/or DNA segments that encode products which are toxic in recipient cells.

[0411] The marker gene can be used as a marker for conformation of successful gene transfer and/or to isolate cells expressing transferred genes and/or to recover transferred genes from a cell. For example, in one aspect, the marker gene is used to isolate and purify antigen presenting cells expressing a bicistronic LAMP construct described herein.

[0412] Substantially similar genes may be provided, e.g., genes with greater than about 50%, greater than about 70%, greater than 80%, greater than about 90%, and preferably, greater than about 95% identity to a known gene. Substantially similar domain sequences may initially be identified by selecting a sequence which specifically hybridizes to a domain sequence of interest under stringent hybridization conditions. Performing assays to determine the suitability of homologous, variant, or modified domain sequences is merely a matter of screening for sequences which express the appropriate activity. Such screening is routine in the art.

[0413] The bicistronic LAMP construct encoding the LAMP-antigen construct and the second polypeptide may be provided as a naked nucleic acid molecule or in a delivery vehicle associated with one or more molecules for facilitating entry of a nucleic acid into a cell. Suitable delivery vehicles include, but are not limited to: liposomal formulations, polypeptides, polysaccharides, lipopolysaccharides, viral formulations (e.g., including viruses, viral particles, artificial viral envelopes and the like), cell delivery vehicles, and the like.

### I. Lipid-Based Formulations

[0414] Delivery vehicles designed to facilitate intracellular delivery of a nucleic acid molecule encoding a bicistronic LAMP construct must interact with both non-polar and polar environments (in or on, for example, the plasma membrane, tissue fluids, compartments within the cell, and the like). Therefore, preferably, delivery vehicles are designed to contain both polar and non-polar domains or a translocating sequence for translocating a nucleic acid molecule encoding a bicistronic LAMP construct into a cell.

[0415] Compounds having polar and non-polar domains are termed amphiphiles. Cationic amphiphiles have polar groups that are capable of being positively charged at, or around, physiological pH for interacting with negatively charged polynucleotides such as DNA.

[0416] The nucleic acid molecules comprising the bicistronic LAMP constructs can be provided in formulations comprising lipid monolayers or bilayers to facilitate transfer of the vectors across a cell membrane. Liposomes or any form of lipid membrane, such as planar lipid membranes or the cell membrane of an intact cell, e.g., a red blood cell, can be used. Liposomal formulations can be administered by any means, including administration intravenously or orally.

[0417] Liposomes and liposomal formulations can be prepared according to standard methods and are well known in the art, see, e.g., Remington's; Akimaru, 1995, Cytokines Mol. Ther. 1:197-210; Alving, 1995, Immunol. Rev. 145:5-31; Szoka, 1980, Ann. Rev. Biophys. Bioeng. 9:467; U.S. Pat. Nos. 4,235,871; 4,501,728; and 4,837,028. In one aspect, the liposome comprises a targeting molecule for targeting a liposome:nucleic acid molecule (bicistronic LAMP construct herein) complex to a particular cell type. In a particular aspect, a targeting molecule comprises a binding partner (e.g., a ligand or receptor) for a biomolecule (e.g., a receptor or ligand) on the surface of a blood vessel or a cell found in a target tissue.

[0418] Liposome charge is an important determinant in liposome clearance from the blood, with negatively charged liposomes being taken up more rapidly by the reticuloendothelial system (Juliano, 1975, Biochem. Biophys. Res. Commun. 63:651) and thus having shorter half-lives in the bloodstream. Incorporating phosphatidylethanolamine derivatives enhances the circulation time by preventing liposomal aggregation. For example, incorporation of N-(omega-carboxy) acylamidophosphatidylethanolamines into large unilamellar vesicles of L-alpha-distearoylphosphatidylcholine dramatically increases the in vivo liposomal circulation lifetime (see, e.g., Ahl, 1997, Biochim. Biophys. Acta 1329:370-382). Liposomes with prolonged circulation half-lives are typically desirable for therapeutic and diagnostic uses. For a general discussion of pharmacokinetics, see, e.g., Remington's, Chapters 37-39, Lee, et al., In Pharmacokinetic Analysis: A Practical Approach (Technomic Publishing AG, Basel, Switzerland 1996).

[0419] Typically, liposomes are prepared with about 5 to 15 mole percent negatively charged phospholipids, such as phosphatidylglycerol, phosphatidylserine or phosphatidyl-inositol. Added negatively charged phospholipids, such as phosphatidylglycerol, also serve to prevent spontaneous liposome aggregation, and thus minimize the risk of undersized liposomal aggregate formation. Membrane-rigidifying agents, such as sphingomyelin or a saturated neutral phospholipid, at a concentration of at least 50 mole percent, and 5 to 15 mole percent of monosialylganglioside can also impart desirably liposome properties, such as rigidity (see, e.g., U.S. Pat. No. 4,837,028).

[0420] Additionally, the liposome suspension can include lipid-protective agents which protect lipids against free-radical and lipid-peroxidative damages on storage. Lipophilic free-radical quenchers, such as alpha-tocopherol and water-soluble iron-specific chelators, such as ferrioxianine, may be used.

[0421] The bicistronic LAMP constructs described herein can also be incorporated into multilamellar vesicles of heterogeneous sizes. For example, vesicle-forming lipids can be dissolved in a suitable organic solvent or solvent system and dried under vacuum or an inert gas to form a thin lipid film. If desired, the film can be redissolved in a suitable solvent, such as tertiary butanol, and then lyophilized to form a more homogeneous lipid mixture which is in a more easily hydrated powder like form. This film is covered with an aqueous solution of the peptide or polypeptide complex and allowed to hydrate, typically over a 15 to 60 minute period with agitation. The size distribution of the resulting multilamellar vesicles can be shifted toward smaller sizes by hydrating the lipids under more vigorous agitation conditions or by adding solubilizing detergents such as deoxycholate. The hydration medium preferably comprises the nucleic acid at a concentration which is desired in the interior volume of the liposomes in the final liposome suspension.

[0422] Following liposome preparation, the liposomes can be sized to achieve a desired size range and relatively narrow distribution of liposome sizes. One exemplary size range is about 0.2 to 0.4 microns, which allows the liposome suspension to be sterilized by filtration through a conventional filter, typically a 0.22-micron filter. Filter sterilization can be carried out on a high throughput basis if the liposomes have been sized down to about 0.2 to 0.4 microns. Several techniques are available for sizing liposome to a desired size (see, e.g., U.S. Pat. No. 4,737,323).

[0423] Suitable lipids include, but are not limited to, DOTMA (Felgner, et al., 1987, Proc. Natl. Acad. Sci. USA 84:7413-7417), DOGS or Transfectain™ (Behr, et al., 1989, Proc. Natl. Acad. Sci. USA 86:6982-6986), DNERIE or DORIE (Felgner, et al., Methods 5:67-75), DC-CHOL (Gao and Huang, 1991, BBRC 179:280-285), DOTAP™ (McLachlan, et al., 1995, Gene Therapy 2:674-622), Lipofectamine™. and glycerolipid compounds (see, e.g., EP901463 and WO98/37916).

[0424] Other molecules suitable for complexing with the bicistronic LAMP constructs may include cationic molecules, such as, polyamidoamine (Haensler and Szoka, 1993, Bioconjugate Chem. 4:372-379), dendritic polylysine (WO 95/24221), polyethylene irinine or polypropylene h-nine (WO 96/02655), polylysine (U.S. Pat. No. 5,595,897; FR 2 719 316), chitosan (U.S. Pat. No. 5,744,166), DNA-gelatin coacervates (see, e.g., U.S. Pat. Nos. 6,207,195; 6,025,337; 5,972,707) or DEAE dextran (Lopata, et al., 1984, Nucleic Acid Res. 12:5707-5717).

### J. Viral-Based Gene Delivery Vehicles

[0425] In one aspect, the nucleic acid molecule comprising the bicistronic LAMP construct is provided as a delivery vehicle comprising a virus or viral particle. In this aspect, preferably, the nucleic acid molecule comprises a viral vector. Viral vectors, such as retroviruses, adenoviruses, adeno-associated viruses and herpes viruses, are often made up of two components, a modified viral genome and a coat structure surrounding it (see, e.g., Smith et al., 1995, Ann. Rev. Microbiol. 49:807-838), although sometimes viral vectors are introduced in naked form or coated with proteins other than viral proteins. Most current vectors have coat structures similar to a wild-type virus. This structure packages and protects the viral nucleic acid and provides the means to bind and enter target cells.

[0426] Preferably, viral vectors comprising the bicistronic LAMP construct described herein are modified from wild-type viral genomes to disable the growth of the virus in a target cell while enabling the virus to grow in a host cell (e.g., such as a packaging or helper cell) used to prepare infectious particles. Vector nucleic acids generally essential cis-acting viral sequences for replication and packaging in a helper line and expression control sequences for regulating the expression of a polynucleotide being delivered to a target cell. Other viral functions are expressed in trans in specific packaging or helper cell lines as are known in the art.

[0427] Viral vectors may be derived from a virus selected from the group consisting of herpes viruses, cytomegaloviruses, foamy viruses, lentiviruses, Semliki forest virus, AAV (adeno-associated virus), poxviruses, adenoviruses and retroviruses. Such viral vectors are well known in the art.

[0428] In one aspect, a viral vector used is an adenoviral vector. The adenoviral genome consists of a linear double-stranded DNA molecule of approximately 36 kb carrying more than about thirty genes necessary to complete the viral replication cycle. The early genes are divided into 4 regions (E1 to E4) that are essential for viral replication with the exception of the E3 region, which is believed to modulate the anti-viral host immune response. The E1 region (EIA and EIB) encodes proteins responsible for the regulation of transcription of the viral genome. Expression of the E2 region genes (E2A and E2B) leads to the synthesis of the polypeptides needed for viral replication. The proteins encoded by the E3 region prevent cytolysis by cytotoxic T cells and tumor necrosis factor (Wold and Gooding, 1991, Virology 184:1-8). The proteins encoded by the E4 region are involved in DNA replication, late gene expression and splicing and host cell shut off (Halbert, et al., 1985, J. Virol. 56:250-257). The late genes generally encode structural proteins contributing to the viral capsid. In addition, the adenoviral genome carries at cis-acting 5′ and 3′ ITRs (Inverted Terminal Repeat) and packaging sequences essential for DNA replication. The ITRs harbor origins of DNA replication while the encapsidation region is required for the packaging of adenoviral DNA into infectious particles.

[0429] Adenoviral vectors can be engineered to be conditionally replicative (CRAd vectors) in order to replicate selectively in specific cells (e.g., such as proliferative cells) as described in Heise and Kim (2000, J. Clin. Invest. 105:847-85 1). In another aspect, an adenoviral vector is replication-defective for the E1 function (e.g., by total or partial deletion or mutagenesis of E1). The adenoviral backbone of the vector may comprise additional modifications (deletions, insertions or mutations in one or more viral genes). An example of an E2 modification is illustrated by the thermosensitive mutation localized on the DBP (DNA Binding Protein) encoding gene (Ensinger et al., 1972, J. Virol. 10:328-339). The adenoviral sequence may also be deleted of all or part of the E4 region (see, e.g., EP 974 668; Christ, et al., 2000, Human Gene Ther. 11:415-427; Lusky, et al., 1999, J. Virol. 73:8308-8319). Additional deletions within the non-essential E3 region may allow the size of the polynucleotide being delivered to be increased (Yeh, et al., 1997, FASEB Journal 11:615 623). However, it may be advantageous to retain all or part of the E3 sequences coding for polypeptides (e.g., such as gp19k) allowing the virus to escape the immune system (Gooding, et al., 1990, Critical Review of Immunology 10:53-71) or inflammatory reactions (EP 00440267.3).

[0430] Second generation vectors retaining the ITRs and packaging sequences and comprising substantial genetic modifications to abolish the residual synthesis of the viral antigens also may be used in order to improve long-term expression of the expressed gene in the transduced cells (see, e.g., WO 94/28152; Lusky, et al., 1998, J. Virol 72:2022-2032).

[0431] The nucleic acid molecules of the disclosure being introduced into the cell may be inserted in any location of the viral genome, with the exception of the cis-acting sequences. Preferably, it is inserted in replacement of a deleted region (E1, E3 and/or E4), preferably, within a deleted E1 region.

[0432] Adenoviruses can be derived from any human or animal source, in particular canine (e.g. CAV-1 or CAV-2 Genbank ref. CAVIGENOM and CAV77082, respectively), avian (Genbank ref. AAVEDSDNA), bovine (such as BAV3; Reddy, et al., 1998, J. Virol. 72:1394 1402), murine (Genbank ref. ADRMUSMAVI), ovine, feline, porcine or simian sources or alternatively, may be a hybrid virus. Any serotype can be employed. In some cases, the human adenoviruses of the C sub-group are used, especially adenoviruses 2 (Ad2) and 5 (Ad5). Such viruses are available, for example, from the ATCC.

[0433] Adenoviral particles or empty adenoviral capsids also can be used to transfer nucleic acid molecules encoding a bicistronic LAMP construct by a virus-mediated cointernalization process as described in U.S. Pat. No. 5,928,944. This process can be accomplished in the presence of cationic agent(s) such as polycarbenes or lipid vesicles comprising one or more lipid layers.

[0434] Adenoviral particles may be prepared and propagated according to any conventional technique in the field of the art (e.g., WO 96/17070) using a complementation cell line or a helper virus, which supplies in trans the missing viral genes necessary for viral replication. The cell lines 293 (Graham et al., 1977, J. Gen. Virol. 36:59-72) and PERC6 (Fallaux et al., 1998, Human Gene Therapy 9:1909-1917) are commonly used to complement E1 deletions. Other cell lines have been engineered to complement defective vectors (Yeh, et al., 1996, J. Virol. 70:559-565; Kroughak and Graham, 1995, Human Gene Ther. 6:1575-1586; Wang, et al., 1995, Gene Ther. 2:775-783; Lusky, et al., 1998, J. Virol. 72:2022-203; EP 919627 and WO 97/04119). The adenoviral particles can be recovered from the culture supernatant but also from the cells after lysis and optionally further purified according to standard techniques (e.g., chromatography, ultracentrifugation, as described in WO 96/27677, WO 98/00524 WO 98/26048 and WO 00/50573).

[0435] Cell-type specific targeting may be achieved with vectors derived from adenoviruses having a broad host range by the modification of viral surface proteins. For example, the specificity of infection of adenoviruses is determined by the attachment to cellular receptors present at the surface of permissive cells. In this regard, the fiber and penton present at the surface of the adenoviral capsid play a critical role in cellular attachment (Defer, et al., 1990, J. Virol. 64:3661-3673). Thus, cell targeting of adenoviruses can be carried out by genetic modification of the viral gene encoding fiber and/or penton, to generate modified fiber and/or penton capable of specific interaction with unique cell surface receptors. Examples of such modifications are described in Wickarn, et al., 1997, J. Virol. 71:8221-8229; Arriberg, et al., 1997, Virol. Chem 268:6866-6869; Roux, et al., 1989, Proc. Natl. Acad. Sci. USA 86:9079-9083; Miller and Vile, 1995, FASEB J. 9:190-199; WO 93/09221, and in WO 95/28494.

[0436] In a particular aspect, adeno-associated viral sequences are used as vectors. Vectors derived from the human parvovirus AAV-2 (adeno-associated virus type 2) are among the most promising gene delivery vehicles currently being developed. Several of the features of this system for packaging a single-stranded DNA suggest it as a possible alternative to naked DNA for delivery. A primary attractive feature, in contrast to other viral vectors such as vaccinia or adenovirus, is that AAV vectors do not express any viral genes. The only viral DNA sequences included in the vaccine construct are the 145 bp inverted terminal repeats (ITR). Thus, as in immunization with naked DNA, the only gene expressed is that of the antigen, or antigen chimera. Additionally, AAV vectors are known to transduce both dividing and non-dividing cells, such as human peripheral blood monocyte-derived dendritic cells, with persistent transgene expression, and with the possibility of oral and intranasal delivery for generation of mucosal immunity. Moreover, the amount of DNA required appears to be much less by several orders of magnitude, with maximum responses at doses of 10¹⁰ to 10¹¹ particles or copies of DNA in contrast to naked DNA doses of 50 μg or about 10¹⁵ copies.

[0437] In one aspect, AAV vectors are packaged by co-transfection of a suitable cell line (e.g., human 293 cells) with the DNA contained in the AAV ITR chimeric protein encoding constructs and an AAV helper plasmid ACG2 containing the AAV coding region (AAV rep and cap genes) without the ITRs. The cells are subsequently infected with the adenovirus Ad5. Vectors can be purified from cell lysates using methods known in the art (e.g., such as cesium chloride density gradient ultracentrifugation) and are validated to ensure that they are free of detectable replication-competent AAV or adenovirus (e.g., by a cytopathic effect bioassay). AAV titer may be determined by quantitative PCR with virus DNA samples prepared after digestion with proteinase K. Preferably, vector titers produced by such a method are approximately 5×10¹² to 1×10¹³ DNase resistant particles per ml.

[0438] In other aspects, retroviral vectors are used. Retroviruses are a class of integrative viruses which replicate using a virus-encoded reverse transcriptase, to replicate the viral RNA genome into double stranded DNA which is integrated into chromosomal DNA of the infected cells (e.g., target cells). Such vectors include those derived from murine leukemia viruses, especially Moloney (Gilboa, et al., 1988, Adv. Exp. Med. Biol. 241:29) or Friend's FB29 strains (WO 95/01447). Generally, a retroviral vector is deleted of all or part of the viral genes gag, pol and env and retains 5′ and 3′ LTRs and an encapsidation sequence. These elements may be modified to increase expression level or stability of the retroviral vector. Such modifications include the replacement of the retroviral encapsidation sequence by one of a retrotransposon such as VL30 (see, e.g., U.S. Pat. No. 5,747,323). Preferably, the nucleic acid molecule of the disclosure is inserted downstream of the encapsidation sequence, preferably in opposite direction relative to the retroviral genome. Cell specific targeting may be achieved by the conjugation of antibodies or antibody fragments to the retroviral envelope protein as is known in the art.

[0439] Retroviral particles are prepared in the presence of a helper virus or in an appropriate complementation (packaging) cell line which contains integrated into its genome the retroviral genes for which the retroviral vector is defective (e.g., gag/pol and env). Such cell lines are described in the prior art (Miller and Rosman, 1989, BioTechniques 7:980; Danos and Mulligan, 1988, Proc. Natl. Acad. Sci. USA 85:6460; Markowitz, et al., 1988, Virol. 167:400). The product of the env gene is responsible for the binding of the viral particle to the viral receptors present on the surface of the target cell and, therefore determines the host range of the retroviral particle. in the context of the disclosure, it is advantageous to use a packaging cell line, such as the PA317 cells (ATCC CRL 9078) or 293E16 (WO97/35996) containing an amphotropic envelope protein, to allow infection of human and other species' target cells. The retroviral particles are preferably recovered from the culture supernatant and may optionally be further purified according to standard techniques (e.g., chromatography, ultracentrifugation).

[0440] Other suitable viruses include poxviruses. The genome of several members of poxyviridae has been mapped and sequenced. A poxyviral vector may be obtained from any member of the poxyviridae, in particular canarypox, fowlpox and vaccinia virus. Suitable vaccinia viruses include, but are not limited to, the Copenhagen strain (Goebel, et al., 1990, Virol. 179:247-266; Johnson, et al., 1993, Virol. 196:381-401), the Wyeth strain and the modified Ankara (MVA) strain (Antoine, et al., 1998, Virol. 244:365-396). The general conditions for constructing a vaccinia virus vector are known in the art (see, e.g., EP 83 286 and EP 206 920; Mayr et al., 1975, Infection 3:6-14; Sutter and Moss, 1992, Proc. Natl. Acad. Sci. USA 89:10847-10851). Preferably, the polynucleotide of interest is inserted within a non-essential locus such as the noncoding intergenic regions or any gene for which inactivation or deletion does not significantly impair viral growth and replication.

[0441] Poxyviral particles are prepared as described in the art (Piccini, et al., 1987, Methods of Enzymology 153:545-563; U.S. Pat. Nos. 4,769,330; 4,772,848; 4,603,112; 5,100,587 and 5,179,993). Generally, a donor plasmid is constructed, amplified by growth in E. coli and isolated by conventional procedures. Then, it is introduced into a suitable cell culture (e.g., chicken embryo fibroblasts) together with a poxvirus genome, to produce, by homologous recombination, poxyviral particles. These can be recovered from the culture supernatant or from the cultured cells after a lysis step (e.g., chemical lysis, freezing/thawing, osmotic shock, sonication and the like). Consecutive rounds of plaque purification can be used to remove contaminating wild type virus. Viral particles can then be purified using the techniques known in the art (e.g., chromatographic methods or ultracentrifugation on cesium chloride or sucrose gradients).

[0442] The use of vaccinia as a live virus vaccine in the global campaign to eradicate smallpox made vaccinia an obvious choice for development as a live recombinant vaccine vector. Live recombinant vaccinia viruses expressing close to 100 different foreign proteins have been reported, and a number of these are effective experimental vaccines (reviewed by Moss and Flexner, 1987). Vaccinia is particularly versatile as an expression vector because of its large genomic size, capability of accepting at least 25,000 base pairs of foreign DNA, and its ability to infect most eukaryotic cell types, including insect cells (ibid.). Unlike other DNA viruses, poxviruses replicate exclusively in the cytoplasm of infected cells, reducing the possibility of genetic exchange of recombinant viral DNA with the host chromosome. Recombinant vaccinia vectors have been shown to properly process and express proteins from a variety of sources including man, other mammals, parasites, RNA and DNA viruses, bacteria and bacteriophage.

[0443] The expression of DNA encoding a foreign protein is controlled by host virus regulatory elements, including upstream promoter sequences and, where necessary, RNA processing signals. Insertion of foreign DNA into nonessential regions of the vaccinia virus genome has been carried out by homologous recombination (Panicali, et al., Proc. Nat'l. Acad. Sci, USA, 79:4927, 1982; Mackett, et al., Proc. Nat'l. Acad. Sci. USA, 79:7415, 1982).

[0444] Expression of polypeptides by the nucleic acid molecule of the disclosure may occur because of transcriptional regulatory elements at or near the site of insertion or by more precise genetic engineering. Plasmid vectors that greatly facilitate insertion and expression of foreign genes have been constructed (Mackett, et al., J. Virol, 49:857, 1982). These vectors contain an expression site, composed of a vaccinia transcriptional promoter and one or more unique restriction endonuclease sites for insertion of the foreign coding sequence flanked by DNA from a nonessential region of the vaccinia genome. The choice of promoter determines both the time (e.g., early or late) and level of expression, whereas the flanking DNA sequence determines the site of homologous recombination.

[0445] Only about one in a thousand virus particles produced by this procedure is a recombinant. Although recombinant virus plaques can be identified by DNA hybridization, efficient selection procedures have been developed. By using segments of nonessential vaccinia virus thymidine kinase (TK) gene as flanking sequences, the foreign gene recombines into the TK locus and by insertion inactivates the TK gene. Selection of TK virus is achieved by carrying out the virus plaque assay in TK cells in the presents of 5-bromodeoxyuridine. Phosphorylation of the nucleoside analogue and consequent lethal incorporation into viral DNA occurs only in cells infected with TK+ parental virus. Depending on the efficiency of the transfection and recombination, up to 80 of the plaques are desired recombinants, and the rest are spontaneous TK mutants.

[0446] Plasmid vectors that contain the E. coli beta-galactosidase gene, as well as an expression site for a second gene, permit an alternative method of distinguishing recombinant from parental virus (Chakrabarti, et al., Mol. Cell. Biol., 5:3403, 1985). Plaques formed by such recombinants can be positively identified by the blue color that forms upon addition of an appropriate indicator. By combining both TK selection and beta-galactosidase expression, recombinant virus is readily and quickly isolated. The recombinants are then amplified by propagation in suitable cell lines and expression of the inserted gene is checked by appropriate enzymological, immunological or physical procedures.

[0447] An upper limit to the amount of genetic information that can be added to the vaccinia virus genome is not yet known. However, the addition of nearly 25,000 base pairs of foreign DNA had no apparent deleterious effect on virus yield (Smith, et al., Gene, 25:21, 1983). Were it necessary, large segments of the vaccinia virus genome could be deleted to provide additional capacity (Moss, et al., J. Virol. 40:387, 1981).

[0448] Viral capsid molecules may include targeting moieties to facilitate targeting and/or entry into cells. Suitable targeting molecules, include, but are not limited to: chemical conjugates, lipids, glycolipids, hormones, sugars, polymers (e.g., PEG, polylysine, PEI and the like), peptides, polypeptides (see, e.g., WO 94/40958), vitamins, antigens, lectins, antibodies and fragments thereof. Preferably, such targeting molecules recognize and bind to cell-specific markers, tissue-specific markers, cellular receptors, viral antigens, antigenic epitopes or tumor-associated markers.

[0449] Compositions comprising a bicistronic LAMP construct, based on viral particles may be formulated in the form of doses of between 10 and 1014 i.u. (infectious units), and preferably, between 10 and 10¹¹ i.u. The titer may be determined by conventional techniques. The doses of bicistronic LAMP constructs are preferably comprised between 0.01 and 10 mg/kg, more especially between 0.1 and 2 mg/kg.

### K. Self-Replicating RNA

[0450] Self-replicating RNA virus vectors (also called self-amplifying RNA virus vectors) can also be constructed using the bicistronic LAMP construct described herein. For example, alphaviruses, flaviviruses, measle virus and rhabdoviruses can be used to generate self-replicating RNA virus vaccines. Exemplary strains of self-replicating RNA viruses include, but are not limited to rabies virus (RABV), vesicular stomatitis virus (VSV), West Nile virus, Kunjin virus, Semliki Forest virus (SFV), Sindbis virus (SIN) and/or Venezuelan equine encephalitis virus (VEE).

[0451] Self-replicating RNA viruses express the native antigen upon delivery into tissue, thus mimicking live attenuated vaccines without having the risk of reversion to pathogenicity. They also stimulate the innate immune system, thus potentiating responses. See, e.g., Ljungberg, K. “Self-replicating alphavirus RNA vaccines,” Expert Rev Vaccines (2): 177-94 (2015); Lundstrom, K., “Oncolytic Alphaviruses in Cancer Immunotherapy”, Vaccines 5:9 (2017); Lundstrom, K. “Replicon RNA Viral Vectors as Vaccines,” Vaccines 4:39 (2016) (hereby incorporated by reference in their entirety). Use of self-replicating vaccines comprising the bicistronic LAMP constructs described herein can also be used in prime-boost protocols.

[0452] Moreover, self-replicating RNA viruses can also be encapsulated by liposomes, as described herein, to improve delivery and targeting. Immunization with self-replicating RNA viruses comprising a nucleic acid molecule described herein may provide higher transient expression levels of antigens resulting in generation of neutralizing antibody responses and protection against lethal challenges under safe conditions.

### L. Cell-Based Delivery Vehicles

[0453] The nucleic acid molecules according to the disclosure can be delivered to target cells by means of other cells (“delivery cells”) which comprise the constructs. Methods for introducing nucleic acid molecules into cells are known in the art and include microinjection of DNA into the nucleus of a cell (Capechi, et al., 1980, Cell 22:479-488); transfection with CaP0₄ (Chen and Okayama, 1987, Mol. Cell Biol. 7:2745 2752), electroporation (Chu, et al., 1987, Nucleic Acid Res. 15:1311-1326); lipofection/liposome fusion (Feigner, et al., 1987, Proc. Natl. Acad. Sci. USA 84:7413-7417) and particle bombardment (Yang, et al., 1990, Proc. Natl. Acad. Sci. USA 87:9568-9572). Suitable cells include autologous and non-autologous cells, and may include xenogenic cells. Delivery cells may be induced to deliver their contents to the target cells by inducing their death (e.g., by providing inducible suicide genes to these cells).

### M. Accessory Molecules

[0454] The compositions comprising the nucleic acid molecules according to the disclosure may comprise one or more accessory molecules for facilitating the introduction of the nucleic acid molecule into a cell and/or for enhancing a particular therapeutic effect and/or enhancing antibody production.

[0455] In addition, the composition may include one or more stabilizing substance(s), such as lipids, nuclease inhibitors, hydrogels, hyaluronidase (WO 98/53853), collagenase, polymers, chelating agents (EP 890362), in order to inhibit degradation within the animal/human body and/or improve transfection/infection of the vector into a target cell. Such substances may be used alone or in combination (e.g., cationic and neutral lipids).

[0456] It has also been shown that adenovirus proteins are capable of destabilizing endosomes and enhancing the uptake of DNA into cells. The mixture of adenoviruses to solutions containing a lipid-complexed DNA vector or the binding of DNA to polylysine covalently attached to adenoviruses using protein cross-linking agents may substantially improve the uptake and expression of a bicistronic LAMP construct comprising a nucleic acid molecule (see, e.g., Curiel, et al., 1992, Am. I. Respir. Cell. Mol. Biol. 6:247-252).

### N. Host Cells

[0457] Nucleic acid molecules according to the disclosure can be expressed in a variety of host cells, including, but not limited to: prokaryotic cells (e.g., E. coli, Staphylococcus sp., Bacillus sp.); yeast cells (e.g., Saccharomyces sp.); insect cells; nematode cells; plant cells; amphibian cells (e.g., Xenopus); avian cells; and mammalian cells (e.g., human cells, mouse cells, mammalian cell lines, primary cultured mammalian cells, such as from dissected tissues).

[0458] The molecules can be expressed in host cells isolated from an organism, host cells which are part of an organism, or host cells which are introduced into an organism. In one aspect, the nucleic acid molecules are expressed in host cells in vitro, e.g., in culture. In another aspect, the nucleic acid molecules are expressed in a transgenic organism (e.g., a transgenic mouse, rat, rabbit, pig, primate, etc.) that comprises somatic and/or germline cells comprising nucleic acids encoding the bicistronic LAMP construct herein. Methods for constructing transgenic animals are well known in the art and are routine.

[0459] Nucleic acid molecules as described herein also can be introduced into cells in vitro, and the cells (e.g., such as stem cells, hematopoietic cells, lymphocytes, and the like) can be introduced into the host organism. The cells may be heterologous or autologous with respect to the host organism. For example, cells can be obtained from the host organism, a nucleic acid molecule introduced into the cells in vitro, and then reintroduced into the host organism.

### O. Antigen Presenting Cells

[0460] In an aspect of the disclosure, a nucleic acid molecule as described herein is introduced into a natural or engineered antigen presenting cell.

[0461] The term “antigen presenting cell” (APC) as used herein intends any cell which presents on its surface an antigen in association with a major histocompatibility complex molecule, preferably a MHC class II molecule, or portion thereof. Examples of suitable APCs are discussed in detail below and include, but are not limited to, whole cells such as macrophages, dendritic cells, B cells, hybrid APCs, and foster antigen presenting cells. Methods of making hybrid APCs are described and known in the art.

[0462] Dendritic cells (DCs) are potent antigen-presenting cells. It has been shown that DCs provide all the signals required for T cell activation and proliferation. These signals can be categorized into two types. The first type, which gives specificity to the immune response, is mediated through interaction between the T-cell receptor/CD3 (“TCR/CD3”) complex and an antigenic peptide presented by a major histocompatibility complex (“MHC” defined above) class I or II protein on the surface of APCs. This interaction is necessary, but not sufficient, for T cell activation to occur. In fact, without the second type of signals, the first type of signals can result in T cell anergy. The second type of signals, called co-stimulatory signals, is neither antigen-specific nor MHC-restricted, and can lead to a full proliferation response of T cells and induction of T cell effector functions in the presence of the first type of signals.

[0463] Several molecules have been shown to enhance co-stimulatory activity. These include, but are not limited to, heat stable antigen (HSA), chondroitin sulfate-modified MHC invariant chain (Ii-CS), intracellular adhesion molecule I (ICAM-1), and B7 co-stimulatory molecule on the surface of APCs and its counter-receptor CD28 or CTLA-4 on T cells.

[0464] Other important co-stimulatory molecules are CD40, CD54, CD80, CD86. As used herein, the term “co-stimulatory molecule” encompasses any single molecule or combination of molecules which, when acting together with a peptide/MHC complex bound by a TCR on the surface of a T cell, provides a co-stimulatory effect which achieves activation of the T cell that binds the peptide. The term thus encompasses B7, or other co-stimulatory molecule(s) on an APC, fragments thereof (alone, complexed with another molecule(s), or as part of a fusion protein) which, together with peptide/MHC complex, binds to a cognate ligand and result in activation of the T cell when the TCR on the surface of the T cell specifically binds the peptide. Co-stimulatory molecules are commercially available from a variety of sources, including, for example, Beckman Coulter.

[0465] In one aspect of the disclosure, the method described in Romani et al., J. Immunol. Methods 196:135-151, 1996, and Bender et al, J. Immunol. Methods 196:121-135, 1996, are used to generate both immature and mature dendritic cells from the peripheral blood mononuclear cells (PBMCs) of a mammal, such as a murine, simian or human. Briefly, isolated PBMCs are pre-treated to deplete T- and B-cells by means of an immunomagnetic technique. Lymphocyte-depleted PBMC are then cultured for in RPMI medium 9 e.g., about 7 days), supplemented with human plasma (preferably autologous plasma) and GM-CSF/IL-4, to generate dendritic cells. Dendritic cells are nonadherent when compared to their monocyte progenitors. Thus, on approximately day 7, non-adherent cells are harvested for further processing.

[0466] The dendritic cells derived from PBMC in the presence of GM-CSF and IL-4 are immature, in that they can lose the nonadherence property and revert back to macrophage cell fate if the cytokine stimuli are removed from the culture. The dendritic cells in an immature state are very effective in processing native protein antigens for the MHC class II restricted pathway (Romani, et al., J. Exp. Med. 169:1169, 1989). Further maturation of cultured dendritic cells is accomplished by culturing for 3 days in a macrophage-conditioned medium (CM), which contains the necessary maturation factors. Mature dendritic cells are less able to capture new proteins for presentation but are much better at stimulating resting T cells (both CD4 and CD8) to grow and differentiate.

[0467] Mature dendritic cells can be identified by their change in morphology, such as the formation of more motile cytoplasmic processes; by their nonadherence; by the presence of at least one of the following markers: CD83, CD68, HLA-DR or CD86; or by the loss of Fc receptors such as CD 115 (reviewed in Steinman, Annu. Rev. Immunol. 9:271, 1991). Mature dendritic cells can be collected and analyzed using typical cytofluorography and cell sorting techniques and devices, such as FACScan and FACStar. Primary antibodies used for flow cytometry are those specific to cell surface antigens of mature dendritic cells and are commercially available. Secondary antibodies can be biotinylated Igs followed by FITC- or PE-conjugated streptavidin.

[0468] Alternatively, others have reported that a method for upregulating (activating) dendritic cells and converting monocytes to an activated dendritic cell phenotype. This method involves the addition of calcium ionophore to the culture media convert monocytes into activated dendritic cells. Adding the calcium 21 ionophore A23187, for example, at the beginning of a 24-48 hour culture period resulted in uniform activation and dendritic cell phenotypic conversion of the pooled “monocyte plus DC” fractions: characteristically, the activated population becomes uniformly CD 14 (Leu M3) negative, and upregulates HLA-DR, HLA-DQ, ICAM-1,137.1, and 137.2. Furthermore, this activated bulk population functions as well on a small numbers basis as a further purified. Specific combination(s) of cytokines have been used successfully to amplify (or partially substitute) for the activation/conversion achieved with calcium ionophore: these cytokines include but are not limited to G-CSF, GM-CSF, IL-2, and IL-4. Each cytokine when given alone is inadequate for optimal upregulation.

[0469] The second approach for isolating APCs is to collect the relatively large numbers of precommitted APCs already circulating in the blood. Previous techniques for isolating committed APCs from human peripheral blood have involved combinations of physical procedures such as metrizamide gradients and adherence/nonadherence steps (Freudenthal et al. PNAS 87:7698-7702, 1990); Percoll gradient separations (Mehta-Damani, et al., J. Immunol. 153:996-1003, 1994); and fluorescence activated cell sorting techniques (Thomas et al., J. Immunol. 151:6840-52, 1993).

[0470] There are many other methods routine in the art for isolating professional antigen presenting cells (or their precursors) and that such methods and others which may be developed are not limiting and are encompassed within the scope of the disclosure.

[0471] In one embodiment, the APCs and therefore the cells presenting one or more antigens are autologous. In another embodiment, the APCs presenting the antigen are allogeneic, i.e., derived from a different subject.

[0472] As discussed herein, a nucleic acid molecule as described herein can be introduced into APCs using the methods described above or others known in the art, including, but not limited to, transfection, electroporation, fusion, microinjection, viral-based delivery, or cell based delivery. Arthur et al., Cancer Gene Therapy 4 (1): 17-25, 1997, reports a comparison of gene transfer methods in human dendritic cells.

[0473] Known, partial and putative human leukocyte antigen (HLA), the genetic designation for the human MHC, amino acid and nucleotide sequences, including the consensus sequence, are published (see, e.g., Zemmour and Parham, Immunogenetics 33:310-320, 1991), and cell lines expressing HLA variants are known and generally available as well, many from the American Type Culture Collection (“ATCC”). Therefore, using PCR, MHC class II-encoding nucleotide sequences are readily operatively linked to an expression vector of this disclosure that is then used to transform an appropriate cell for expression therein.

[0474] Professional APCs can be used, such as macrophages, B cells, monocytes, dendritic cells, and Langerhans cells. These are collected from the blood or tissue of 1) an autologous donor; 2) a heterologous donor having a different HLA specificity then the host to be treated; or 3) from a xenogeneic donor of a different species using standard procedures (Coligan, et. al., Current Protocols in Immunology, sections 3 and 14, 1994). The cells may be isolated from a normal host or a patient having an infectious disease, cancer, autoimmune disease, or allergy.

[0475] Professional APCs may be obtained from the peripheral blood using leukopheresis and “FICOLL/HYPAQUE” density gradient centrifugation (stepwise centrifugation through Ficoll and discontinuous Percoll density gradients). Procedures are utilized which avoid the exposure of the APCs to antigens which could be internalized by the APCs, leading to activation of T cells not specific for the antigens of interest.

[0476] Cells which are not naturally antigen presenting can be engineered to be antigen presenting by introducing sequences encoding appropriate molecules. For example, nucleic acid sequences encoding MHC class II molecules, accessory molecules, co-stimulatory molecules and antigen processing assisting molecules can be introduced after direct synthesis, cloning, purification of DNA from cells containing such genes, and the like. One expedient means to obtain genes for encoding the molecules used in the bicistronic LAMP constructs and methods described herein is by polymerase chain reaction (PCR) amplification on selected nucleic acid templates with selected oligonucleotide primer pairs. For example, epithelial cells, endothelial cells, tumor cells, fibroblasts, activated T cells, eosinophils, keratinocytes, astrocytes, microglial cells, thymic cortical epithelial cells, Schwann cells, retinal pigment epithelial cells, myoblasts, vascular smooth muscle cells, chondrocytes, enterocytes, thyrocytes and kidney tubule cells can be used. These may be primary cells recently explanted from a host and not extensively passaged in cell culture to form an established cell line, or established cell lines that are relatively homogeneous and capable of proliferating for many generations or indefinitely.

[0477] Cells that are not professional APCs are isolated from any tissue of an autologous donor; a heterologous donor or a xenogeneic donor, where they reside using a variety of known separation methods (Darling, Animal Cells: Culture and Media. J. Wiley, New York, 1994; Freshney, Culture of Animal Cells. Alan R. Liss, Inc., New York, 1987). Non-autologous cells, e.g., heterologous or xenogeneic cells, can be engineered ex vivo to express HLA class I and class II molecules that match known human HLA specificities. These cells can then be introduced into a human subject matching the HLA specificity of the engineered cells. The cells are further engineered ex vivo to express one or more LAMP Constructs according to the disclosure.

[0478] The engineered cells are maintained in cell culture by standard cell culture methods (Darling, Animal Cells: Culture and Media, J. Wiley, New York, 1994; Freshney, Culture of Animal Cells, Alan R. Liss, Inc., New York, 1987). Cell lines for use in the present disclosure are obtained from a variety of sources (e.g., ATCC Catalogue of Cell Lines & Hybidomas, American Type Culture Collection, 8th edition, 1995), or are produced using standard methods (Freshney, Culture of Immortalized Cells, Wiley-Liss, New York, 1996). Non-transformed cell lines are preferred for use in human subjects.

[0479] In one aspect, CD34+ precursors that are differentiating under the influence of GM-CSF into dendritic cells are obtained from the body of a subject and nucleic acid molecules encoding a bicistronic LAMP construct are introduced into the cells, which are then injected into the subject. Use of the nucleic acid molecules as described herein will enhance the association of peptides derived from a particular antigen with MHC class II molecules on the transduced antigen presenting cells, resulting in significantly more potent systemic T cell dependent immune responses and/or antibody production. While the antigen presenting cells transfected in this strategy are preferably autologous cells, any MHC class II cells that effectively present antigen in the host may be used as described above.

### P. Administration

[0480] Vaccine material according to this disclosure may contain the nucleic acid molecules encoding immune stimulatory bicistronic LAMP constructs described herein or may be recombinant microorganisms, or antigen presenting cells which express the immune stimulatory bicistronic LAMP constructs. Preparation and administration of such nucleic acid molecules for immunization of individuals are accomplished according to principles of immunization that are well known to those skilled in the art.

[0481] Large quantities of these materials may be obtained by culturing recombinant or transformed cells containing the nucleic acid molecules. Culturing methods are well-known to those skilled in the art and are taught in one or more of the documents cited above. The vaccines comprising nucleic acid molecules as described herein are generally produced by culture of recombinant or transformed cells and formulated in a pharmacologically acceptable solution or suspension, which is usually a physiologically-compatible aqueous solution, or in coated tablets, tablets, capsules, suppositories or ampules, as described in the art, for example in U.S. Pat. No. 4,446,128, incorporated herein by reference. Administration may be any suitable route, including oral, rectal, intranasal or by injection where injection may be, for example, transdermal, subcutaneous, intramuscular or intravenous.

[0482] The nucleic acid molecules as described herein may be administered to a mammal in an amount sufficient to induce an immune response in the mammal. In some embodiments, a minimum amount for administration is the amount required to elicit antibody formation to a concentration at least 4 times that which existed prior to administration. A typical initial dose for administration would be 10⁵ to 10¹¹ plaque forming units of a recombinant vector, although this amount may be adjusted by a clinician doing the administration as commonly occurs in the administration of vaccines and other agents which induce immune responses. A single administration may usually be sufficient to induce immunity.

[0483] Vaccines comprising nucleic acid molecules as described herein may be tested initially in a non-human mammal (e.g., a mouse or primate). For example, assays of the immune responses of inoculated mice can be used to demonstrate greater antibody, T cell proliferation, and cytotoxic T cell responses to the bicistronic LAMP constructs than to wild-type antigen. The vaccines can be evaluated in Rhesus monkeys to determine whether the vaccine formulation that is highly effective in mice will also elicit an appropriate monkey immune response. In one aspect, each monkey receives a total of 5 mg nucleic acid molecules per immunization, delivered IM and divided between 2 sites, with immunizations at day 0 and at weeks 4, 8, and 20, with an additional doses optional. Antibody responses, ADCC, CD4+ and CD8+ T-cell cytokine production, CD4+ and CD8+ T-cell antigen-specific cytokine staining can be measured to monitor immune responses to the vaccine.

[0484] Further description of suitable methods of formulation and administration according to this disclosure may be found in U.S. Pat. No. 4,454,116 (constructs), U.S. Pat. No. 4,681,762 (recombinant bacteria), and U.S. Pat. Nos. 4,592,002 and 4,920,209 (recombinant viruses).

### Q. Procedure for Therapy

[0485] In one embodiment, a nucleic acid molecule encoding a bicistronic LAMP construct as described herein could be injected into the patient at any suitable time during the course of their malignancy. For example, a nucleic acid molecule as described herein would be injected at a stage when the tumor burden was low. In an alternative embodiment in which the nucleic acid molecule is introduced into the individual's antigen presenting cells, precursors to the antigen presenting cells or mature antigen presenting cells are drawn either from the individual's bone marrow or peripheral blood by vena puncture. These cells are established in culture followed by transduction with the nucleic acid molecule. Once transduction had occurred, these antigen presenting cells are injected back into the patient.

[0486] In a particular embodiment, the disclosure provides a method of treatment for a cancer patient having low tumor burden, such as early in the disease, after resection of a neoplastic tumor, or when the burden of tumor cells is otherwise reduced. In this method, a cell population containing autologous stem cells capable of differentiation into antigen presenting cells which will express MHC class II molecules is obtained from the patient. These cells are cultured and transformed by introducing a bicistronic LAMP construct described herein to deliver the antigen to be associated with an MHC class II molecule either within the compartment/organelle or within another compartment/organelle to which the antigen is delivered, and secrete a second antigen or IREG into the circulation.

[0487] The transfected stem cell population is then reintroduced into the patient, where the stem cells differentiate into antigen presenting cells which express MHC class II molecules complexed with Tₕ epitopes from the antigen. The immune response to the antigen will be enhanced by enhanced stimulation of the helper T cell population. The secreted antigen or IREG enhances the immune response by, for example, expanding the memory response.

[0488] More generally, in one embodiment, this disclosure provides a vaccine composition comprising a nucleic acid molecule encoding a bicistronic LAMP construct for modulating an immune response in a mammal to an antigen (i.e., stimulating, enhancing, or reducing such a response).

### R. Kits

[0489] The disclosure further comprises kits to facilitate performing the methods described herein. In one aspect, a kit comprises a nucleic acid molecule encoding a bicistronic LAMP construct as described herein and a cell for receiving the nucleic acid molecule. In one aspect, the cell is a professional APC. The cell may or may not express co-stimulatory molecules. In an aspect, when the cell does not express co-stimulatory molecules, the antigen encoded by the bicistronic LAMP construct is an auto-antigen. In another aspect, a panel of cells is provided expressing different MHC molecules (e.g., known to be expressed in human beings). In a further aspect, the kit comprises reagents to facilitate entry of the nucleic acid molecule into a cell (e.g., lipid-based formulations, viral packaging materials, cells, and the like). In still a further aspect, one or more T cell lines specific for the antigen encoded by the nucleic acid molecule is provided, to verify the ability of the bicistronic LAMP construct to elicit, modulate, or enhance an immune response.

### S. Additional Embodiments

[0490] Additional embodiments herein include the following:

[0491] 1. A nucleic acid molecule comprising:
[0492] a. a first polynucleotide sequence encoding a LAMP-antigen Construct comprising an antigen and a Cysteine Conserved Fragment of a LAMP protein; and
[0493] b. a second polynucleotide sequence encoding at least one IREG polypeptide operably linked to a secretion signal sequence;
[0494] c, wherein said first and second polynucleotide sequences are operably linked to expression control sequence(s) for expression of the LAMP-antigen Construct and IREG in a host or target cell.

[0495] 2. The nucleic acid molecule of embodiment 1, wherein:
[0496] a. the antigen is placed at the N-terminus of the Cysteine Conserved Fragment;
[0497] b. the antigen is placed at the C-terminus of the Cysteine Conserved Fragment; or
[0498] c. the antigen is placed in between two Cysteine Conserved Fragments.

[0499] 3. A nucleic acid molecule comprising:
[0500] a. a first polynucleotide sequence encoding a LAMP-antigen Construct comprising an antigen placed between two Cysteine Conserved Fragments; and
[0501] b. a second polynucleotide sequence encoding at least one IREG polypeptide operably linked to a secretion signal sequence;
[0502] c, wherein said first and second polynucleotide sequences are operably linked to expression control sequence(s) for expression of the LAMP-antigen Construct and the IREG polypeptide in a host or target cell.

[0503] 4. The nucleic acid molecule of any one of the preceding embodiments, wherein the improved LAMP Construct comprises the structure shown in FIG. 1 of ILC-1, ILC-2, ILC-3, ILC-4, ILC-5, or ILC-6 (i.e., wherein the first polynucleotide sequence encodes a polypeptide comprising the structure shown in FIG. 1 of ILC-1, ILC-2, ILC-3, ILC-4, ILC-5, or ILC-6).

[0504] 5. The nucleic acid molecule of any one of the preceding embodiments, wherein the Cysteine Conserved Fragment(s) comprise a Homology Domain of a LAMP Protein.

[0505] 6. The nucleic acid molecule of any one of the preceding embodiments, wherein the improved LAMP Construct further comprises a Transmembrane Domain of a LAMP Protein.

[0506] 7. The nucleic acid molecule of any one of the preceding embodiments, wherein the improved LAMP Construct further comprises a signal sequence.

[0507] 8. The nucleic acid molecule of embodiment 7, wherein the signal sequence is derived from a LAMP Protein.

[0508] 9. The nucleic acid molecule of any one of the preceding embodiments, wherein the antigen comprising the LAMP-antigen Construct is placed in, or replaces, a LAMP hinge region.

[0509] 10. The nucleic acid molecule of any one of the preceding embodiments, wherein the LAMP protein is selected from LAMP-1, LAMP2, LAMP-3, LIMP 2, Macrosailin, Endolyn, LAMP5, or LIMBIC.

[0510] 11. The nucleic acid molecule of embodiment 10, wherein the LAMP protein is selected from any one of SEQ ID NOS: 1-113.

[0511] 12. The nucleic acid molecule of embodiment 10, wherein the LAMP protein is at least 70%, at least 75%, at least 80%, at least 85%, at least 90%, at least 95%, 96%, 97%, 98% or 99% identical to SEQ ID NOS: 1-113.

[0512] 13. The nucleic acid molecule of any one of the preceding embodiments, wherein expression of the LAMP-antigen Construct in a host or target cell results in processing and presentation of the antigen to the MHC class II pathway to elicit an immune response.

[0513] 14. The nucleic acid molecule of any one of the preceding embodiments, wherein expression of the IREG in a host or target cell results in the secretion of the IREG.

[0514] 15. The nucleic acid molecule of embodiment 14, wherein secretion of the IREG may enhance an immune response elicited by the antigen.

[0515] 16. The nucleic acid molecule of any one of embodiments 1-15, wherein the antigen is an antigen associated with an infectious disease such as Covid-19, an antigen associated with cancer, SARS-COV-2 virus S1 spike subunit, HER2, NY-ESO1, or CD161 or a domain of SARS-COV-2 virus S1 spike subunit, HER2, NY-ESO1, or CD161.

[0516] 17. The nucleic acid molecule of any one of the preceding embodiments, wherein the nucleic acid molecule is a plasmid or vector.

[0517] 18. The nucleic acid molecule of embodiment 17, wherein the nucleic acid molecule is a viral vector.

[0518] 19. A host cell comprising the nucleic acid molecule of any one of embodiments 1 to 18.

[0519] 20. A composition comprising the nucleic acid molecule of any one of embodiments 1 to 18, or the host cell of embodiment 19.

[0520] 21. A method of treating a subject having a disease or a disorder, wherein the method comprises administering to a subject in need thereof the nucleic acid molecule of any one of embodiments 1-18 or the host cell of embodiment 19, or the composition of embodiment 20 in an amount sufficient to reduce or treat the disease or disorder.

### EXAMPLES

[0521] The disclosure will now be further illustrated with reference to the following examples. It will be appreciated that what follows is by way of example only and that modifications to detail may be made while still falling within the scope of the disclosure.

### Example 1. Construction of Vectors Encoding Bicistronic Lamp Constructs

[0522] A first generation COVID-19 vaccine candidate was designed, encoding one COVID-19 antigen as a LAMP fusion protein and a second COVID-19 antigen as a secreted protein. The construct is named the ITI-COVID-19 bicistronic construct (ITI-Bicistronic-S1-LAMP-RBG pA-EF1-S2P BGH pA; SEQ ID NO: 228, FIG. 28C), and was demonstrated to both induce SARS-Cov-2-specific antibodies and T cell responses. To obtain optimal antibody and T cell responses, the dose of the vaccine (20 μg) and the period of time between priming and boost (e.g., 14 days) were studied. After two immunizations with 20 μg ITI-COVID-19 bicistronic vaccine, robust SARS-Cov-2 spike-specific T cells and antibodies were induced. Importantly, the ITI-COVID-19 bicistronic vaccine elicited antibody responses that neutralized SARS-Cov-2.

[0523] The S1 and S2 subunits of spike mediate entry of the SARS-COV-2 virus into a host cell. Using a nucleic acid molecule for an ILC-4 LAMP construct, the S1 coding sequence (GenBank MN908974) was located between the polynucleotide sequences encoding two LAMP homology domains (N-Lamp and Luminal domain 2). The S1 coding sequence was operably linked to a CMV promoter under the influence of a CMV enhancer sequence, so that expression in a host cell resulted in an ILC-4 LAMP construct comprising the S1 antigen for processing and presentation to MHC class II molecules (i.e., to provide the “priming antigen”). The S2 coding sequence was provided elsewhere on the vector and was operably linked to a polynucleotide sequence encoding an Ig-kappa secretion signal (leader sequence) and an EF1 promoter sequence, so that expression in a host cell resulted in an S2 antigen for secretion (i.e., to provide the “boosting antigen”). The vector thereby provided a single nucleic acid molecule for introduction into a suitable host or target cell capable of providing both priming and boosting antigens to elicit an enhanced immune response. This may therefore confer a significant advantage over the use of a vector which only encodes a bicistronic LAMP construct inasmuch as any desire or requirement to boost the immune response elicited by the LAMP construct will require the administration of a separately administered booster vaccine (e.g., comprising the antigen) at one or more time intervals.

[0524] The first generation ITI-COVID-19 bicistronic vaccine expresses the S1 and S2 subunits of the virus surface-anchored spike glycoprotein. The S1 and S2 subunits of spike mediate entry of the SARS-COV-2 virus into a host cell. Using a nucleic acid molecule for an ILC-4 LAMP construct, the S1 coding sequence (GenBank MN908974) was located between the polynucleotide sequences encoding two LAMP homology domains (N-Lamp and Luminal domain 2). The S1 coding sequence is operably linked to a CMV promoter under the influence of a CMV enhancer sequence, so that expression in a host cell results in an ILC-4 LAMP construct comprising the S1 antigen for processing and presentation to MHC class II molecules (i.e., to provide the “priming antigen”). The S2 coding sequence is provided elsewhere on the vector and is operably linked to a polynucleotide sequence encoding an Ig-kappa secretion signal (leader sequence) and an EF1 promoter sequence, so that expression in a host cell results in an S2 antigen for secretion (i.e., to provide the “boosting antigen”). The vector thereby provides a single nucleic acid molecule for introduction into a suitable host or target cell capable of providing target and enhancement antigens to elicit an enhanced immune response. This may therefore confer a significant advantage over the use of a vector which only encodes a bicistronic LAMP construct inasmuch as any desire or requirement to enhance the immune response elicited by the LAMP construct will require the administration of a separately administered booster vaccine (e.g., comprising the antigen) at one or more time intervals.

[0525] The polynucleotide sequence of this first generation COVID-19 bicistronic construct is shown in FIG. 28C. DNA sequences for S1 and S2 were obtained from, for example, Genbank (ncbi.nlm.nih.gov/genbank/sars-cov-2-seqs/#nucleotide-sequences). In the vector shown in FIG. 28A, the S2 polynucleotide sequence encodes an S2 variant including two proline (P) substitutions. Specifically, the ITI-COVID-19 bicistronic vaccine (first generation vaccine) expresses an S1-LAMP sequence (residues 950-2004 of SEQ ID NO: 227 shown in FIG. 28C), as described in more detail below and a Spike protein (residues 16-1273) with an Ig-kappa leader sequence (see FIG. 28C; residues 2145-3423 of SEQ ID NO: 227).

[0526] Table 1 below provides exemplary DNA and protein sequences of the above bicistronic LAMP constructs as well as various exemplary promoter/enhancer sequences and polypeptide sequences that may be used in constructing bicistronic LAMP constructs described herein.

[0527] The following additional bicistronic LAMP constructs were constructed using standard molecular biology techniques well known to the skilled artisan: (1) HER2-LAMP-sCD40L (FIG. 11; SEQ ID NO: 197), (2) HER2-LAMP-mFLT3L (SEQ ID NO: 208), (3) HER2-LAMP-IL-12 (SEQ ID NO: 212), (4) HER2-LAMP-IL-21 (SEQ ID NO: 216), (5) HER2-LAMP-OX40L (SEQ ID NO: 241), (6) HER2-LAMP-CD80 (SEQ ID NO: 251), (7) NY-ESO1-LAMP-IL-15 (SEQ ID NO: 222), (8) CD161-LAMP-sCD40L (SEQ ID NO: 235), and a second generation Covid-19 construct (9) Spike-LAMP-sCD40L (2-V Covid vaccine; SEQ ID NO: 230). Sequences for these constructs and their components are provided in the table below.

[0528] HER2-LAMP-sCD40L expresses a HER2-LAMP polypeptide SEQ ID NO: 195 and a mSPD-sCD40L fusion protein SEQ ID NO: 196. HER2-LAMP-mFLT3L expresses a HER2-LAMP polypeptide (SEQ ID NO: 195) and an SPD-mFLT3L polypeptide SEQ ID NO: 207. HER2-LAMP-IL-12 expresses a HER2-LAMP polypeptide (SEQ ID NO: 195) and a murine IL-12 p36-P2A-IL-12p40 polypeptide SEQ ID NO: 213. HER2-LAMP-IL-21 expresses a HER2-LAMP polypeptide (SEQ ID NO: 195) and a murine IL-21 polypeptide SEQ ID NO: 217. HER2-LAMP-OX40L expresses a HER2-LAMP polypeptide (SEQ ID NO: 195) and an OX40L extracellular domain (ECD) Fc fusion protein with a murine IL-2 signal peptide (SP) SEQ ID NO: 242. HER2-LAMP-CD80 expresses a HER2-LAMP polypeptide (SEQ ID NO: 195) and a CD80 ECD with a murine IL-2 SP SEQ ID NO: 252. The Spike-LAMP-sCD40L expresses a Spike-LAMP polypeptide SEQ ID NO: 229 and an SPD-sCD40L polypeptide SEQ ID NO: 233. A table illustrating these and other sequences now follows. In comparison to the US provisional priority application, SEQ ID NO: 195 has been updated to reflect that the HER2-LAMP polypeptide sequence comprises SEQ ID NO: 198 followed by SEQ ID NO: 200 followed by SEQ ID NO: 202, and duplicate HER2-LAMP sequences that were included in the provisional priority application have been deleted without changing the overall numbering of the surrounding sequences. SEQ ID NOs: 221 and 229 are similarly updated to reflect that the NY-ESO1-LAMP and Spike-LAMP polypeptide sequences comprise SEQ ID NO: 198 followed by the NY-ESO1 antigen or Spike antigen followed by SEQ ID NO: 202.

TABLE 1
DNA and Protein Sequences in Bicistronic Constructs

| | SEQ | |
|---|---|---|
| Protein | ID NO: | Sequence |
| H. sapiens LAMP-1 Protein | 1 | See FIG. 3 |
| Sequence; Accession No. | | |
| NP_005552.3 | | |
| H. sapiens LAMP-2 Protein | 2 | See FIG. 4 |
| Sequence; Accession No. | | |
| NP_002285.1 | | |
| H. sapiens LAMP-3 Protein | 3 | See FIG. 5 |
| Sequence; Accession No. | | |
| NP_055213.2 | | |
| H. sapiens LIMP-2 Protein | 4 | See FIG. 6 |
| Sequence; Accession No. | | |
| NP_005497.1 | | |
| H. sapiens Endolyn Protein | 5 | See FIG. 8 |
| Sequence; Accession No. | | |
| NP_006007.2 | | |
| M. musculus LAMP-1 Protein | 6 | See FIG. 3 |
| Sequence; Accession No. | | |
| NP_034814.2 | | |
| D. rerio LAMP-1 Protein | 7 | See FIG. 3 |
| Sequence; Accession No. | | |
| NP_955996.1 | | |
| X. Laevis LAMP-1 Protein | 8 | See FIG. 3 |
| Sequence; Accession No. | | |
| NP_001087042.1 | | |
| P. troglodytes LAMP-1 Protein | 9 | See FIG. 3 |
| Sequence; Accession No. | | |
| NP_001233491.1 | | |
| M. mulatta LAMP-1 Protein | 10 | See FIG. 3 |
| Sequence; Accession No. | | |
| XP_001087801.1 | | |
| C, lupus familiaris LAMP-1 | 11 | See FIG. 3 |
| Protein Sequence; Accession | | |
| No. XP_534193.2 | | |
| O. cuniculus LAMP-1 Protein | 12 | See FIG. 3 |
| Sequence; Accession No. | | |
| XP_002723509.1 | | |
| B. taurus LAMP-1 Protein | 13 | See FIG. 3 |
| Sequence; Accession No. | | |
| NP_001068592.1 | | |
| R. novegicus LAMP-1 Protein | 14 | See FIG. 3 |
| Sequence; Accession No. | | |
| NP_036989.1 | | |
| G. gallus LAMP-1 Protein | 15 | See FIG. 3 |
| Sequence; Accession No. | | |
| NP_990614.1 | | |
| S. scrofa LAMP-1 Protein | 16 | See FIG. 3 |
| Sequence; Accession No. | | |
| NP_001011507.1 | | |
| M. domestica LAMP-1 Protein | 17 | See FIG. 3 |
| Sequence; Accession No. | | |
| XP_001374132.1 | | |
| M. gallopavo LAMP-1 Protein | 18 | See FIG. 3 |
| Sequence; Accession No. | | |
| XP_003203252.1 | | |
| T. guttate LAMP-1 Protein | 19 | See FIG. 3 |
| Sequence; Accession No. | | |
| XP_002191607.2 | | |
| A. carolinensis LAMP-1 | 20 | See FIG. 3 |
| Protein Sequence; Accession | | |
| No. XP_003218797.1 | | |
| O. latipes LAMP-1 Protein | 21 | See FIG. 3 |
| Sequence; Accession No. | | |
| XP_004067118.1 | | |
| T. rubripes LAMP-1 Protein | 22 | See FIG. 3 |
| Sequence; Accession No. | | |
| XP_003969941.1 | | |
| S. salar LAMP-1 Protein | 23 | See FIG. 3 |
| Sequence; Accession No. | | |
| NP_001158846.1 | | |
| O. niloticus LAMP-1 Protein | 24 | See FIG. 3 |
| Sequence; Accession No. | | |
| XP_003452974.1 | | |
| M. musculus LAMP-2 Protein | 25 | See FIG. 4 |
| Sequence; Accession No. | | |
| NP_034815.2 | | |
| X. Laevis LAMP-2 Protein | 26 | See FIG. 4 |
| Sequence; Accession No. | | |
| NP_001087881.1 | | |
| D. rerio LAMP-2 Protein | 27 | See FIG. 4 |
| Sequence; Accession No. | | |
| NP_001013551.1 | | |
| 142nubisbis LAMP-2 Protein | 28 | See FIG. 4 |
| Sequence; Accession No. | | |
| XP_003918270.1 | | |
| M. mulatta LAMP-2 Protein | 29 | See FIG. 4 |
| Sequence; Accession No. | | |
| XP_001084005.2 | | |
| P. troglodytes LAMP-2 Protein | 30 | See FIG. 4 |
| Sequence; Accession No. | | |
| XP_003317709.1 | | |
| C. lupus familiaris LAMP-2 | 31 | See FIG. 4 |
| Protein Sequence; Accession | | |
| No. XP_005641822.1 | | |
| E. caballus LAMP-2 Protein | 32 | See FIG. 4 |
| Sequence; Accession No. | | |
| XP_001493687.3 | | |
| B. taurus LAMP-2 Protein | 33 | See FIG. 4 |
| Sequence; Accession No. | | |
| NP_001029742.1 | | |
| S. scrofa LAMP-2 Protein | 34 | See FIG. 4 |
| Sequence; Accession No. | | |
| NP_001231184.1 | | |
| O. aries LAMP-2 Protein | 35 | See FIG. 4 |
| Sequence; Accession No. | | |
| XP_004022401.1 | | |
| R. norvegicus LAMP-2 Protein | 36 | See FIG. 4 |
| Sequence; Accession No. | | |
| NP_058764.2 | | |
| O. anatinus LAMP-2 Protein | 37 | See FIG. 4 |
| Sequence; Accession No. | | |
| XP_001510101.2 | | |
| G. gallus LAMP-2 Protein | 38 | See FIG. 4 |
| Sequence; Accession No. | | |
| NP_001001749.1 | | |
| T. guttata LAMP-2 Protein | 39 | See FIG. 4 |
| Sequence; Accession No. | | |
| XP_002191794.1 | | |
| X. tropicalis LAMP- Protein | 40 | See FIG. 4 |
| Sequence 2; Accession No. | | |
| NP_001116192.2 | | |
| S. salar LAMP-2 Protein | 41 | See FIG. 4 |
| Sequence; Accession No. | | |
| NP_001133282.1 | | |
| O. niloticus LAMP-2 Protein | 42 | See FIG. 4 |
| Sequence; Accession No. | | |
| XP_003445830.1 | | |
| T. rubripes LAMP-2 Protein | 43 | See FIG. 4 |
| Sequence; Accession No. | | |
| XP_003961835.1 | | |
| P. troglodytes LAMP-3 Protein | 44 | See FIG. 5 |
| Sequence; Accession No. | | |
| XP_001155195.3 | | |
| 143nubisbis LAMP-3 Protein | 45 | See FIG. 5 |
| Sequence; Accession No. | | |
| XP_003894825.1 | | |
| M. mulatta LAMP-3 Protein | 46 | See FIG. 5 |
| Sequence; Accession No. | | |
| NP_001028044.1 | | |
| C. lupus familiaris LAMP-3 | 47 | See FIG. 5 |
| Protein Sequence; Accession | | |
| No. XP_848889.2 | | |
| S. scrofa LAMP-3 Protein | 48 | See FIG. 5 |
| Sequence; Accession No. | | |
| XP_003358746.1 | | |
| D. rerio LAMP-3 Protein | 49 | See FIG. 5 |
| Sequence; Accession No. | | |
| XP_001342688.2 | | |
| E. caballus LAMP-3 Protein | 50 | See FIG. 5 |
| Sequence; Accession No. | | |
| XP_001496333.1 | | |
| B. taurus LAMP-3 Protein | 51 | See FIG. 5 |
| Sequence; Accession No. | | |
| NP_001095605.1 | | |
| O. aries LAMP-3 Protein | 52 | See FIG. 5 |
| Sequence; Accession No. | | |
| XP_004003158.1 | | |
| R. norvegicus LAMP-3 Protein | 53 | See FIG. 5 |
| Sequence; Accession No. | | |
| NP_001012015.1 | | |
| M. musculus LAMP-3 Protein | 54 | See FIG. 5 |
| Sequence; Accession No. | | |
| NP_796330.2 | | |
| X. tropicalis LAMP-3 Protein | 55 | See FIG. 5 |
| Sequence; Accession No. | | |
| XP_002936919.2 | | |
| P. troglodytes LIMP-2 Protein | 56 | See FIG. 6 |
| Sequence; Accession No. | | |
| XP_517214.2 | | |
| M. mulatta LIMP-2 Protein | 57 | See FIG. 6 |
| Sequence; Accession No. | | |
| XP_001096458.1 | | |
| C. lupus familiaris LIMP-2 | 58 | See FIG. 6 |
| Protein Sequence; Accession | | |
| No. XP_005639134.1 | | |
| B. taurus LIMP-2 Protein | 59 | See FIG. 6 |
| Sequence; Accession No. | | |
| NP_001095623.1 | | |
| M. musculus LIMP-2 Protein | 60 | See FIG. 6 |
| Sequence; Accession No. | | |
| NP_031670.1 | | |
| D. rerio LIMP-2 Protein | 61 | See FIG. 6 |
| Sequence; Accession No. | | |
| NP_775366.1 | | |
| R. norvegicus LIMP-2 Protein | 62 | See FIG. 6 |
| Sequence; Accession No. | | |
| NP_446453.1 | | |
| G. gallus LIMP-2 Protein | 63 | See FIG. 6 |
| Sequence; Accession No. | | |
| XP_420593.1 | | |
| X. tropicalis LIMP-2 Protein | 64 | See FIG. 6 |
| Sequence; Accession No. | | |
| NP_001016557.1 | | |
| D. melanogaster LIMP-2 | 65 | See FIG. 6 |
| Protein Sequence; Accession | | |
| No. NP_726504.2 | | |
| A. gambiae LIMP-2 Protein | 66 | See FIG. 6 |
| Sequence; Accession No. | | |
| XP_314345.2 | | |
| H. sapiens LIMBIC/SLAMP | 67 | See FIG. 7 |
| Protein Sequence; Accession | | |
| No. NP_002329.2 | | |
| P. troglodytes | 68 | See FIG. 7 |
| LIMBIC/SLAMP Protein | | |
| Sequence; Accession No. | | |
| XP_516662.2 | | |
| O. cuniculus LIMBIC/SLAMP | 69 | See FIG. 7 |
| Protein Sequence; Accession | | |
| No. XP_002716722.1 | | |
| M. musculus LIMBIC/SLAMP | 70 | See FIG. 7 |
| Protein Sequence; Accession | | |
| No. NP_780757.1 | | |
| X. Laevis LIMBIC/SLAMP | 71 | See FIG. 7 |
| Protein Sequence; Accession | | |
| No. NP_001086181.1 | | |
| D. rerio LIMBIC/SLAMP | 72 | See FIG. 7 |
| Protein Sequence; Accession | | |
| No. NP_0010349421.1 | | |
| M. musculus Endolyn Protein | 73 | See FIG. 8 |
| Sequence; Accession No. | | |
| NP_058594.1 | | |
| M. mulatta Endolyn Protein | 74 | See FIG. 8 |
| Sequence; Accession No. | | |
| XP_001091286.1 | | |
| S. scrofa Endolyn Protein | 75 | See FIG. 8 |
| Sequence; Accession No. | | |
| XP_001924661.2 | | |
| B. taurus Endolyn Protein | 76 | See FIG. 8 |
| Sequence; Accession No. | | |
| NP_001039506.1 | | |
| O. aries Endolyn Protein | 77 | See FIG. 8 |
| Sequence`; Accession No. | | |
| XP_004011265.1 | | |
| C. lupus familiaris Endolyn | 78 | See FIG. 8 |
| Protein Sequence; Accession | | |
| No. XP_532256.2 | | |
| R. norvegicus Endolyn Protein | 79 | See FIG. 8 |
| Sequence; Accession No. | | |
| NP_114000.1 | | |
| H. sapiens Macrosialin Protein | 80 | See FIG. 9 |
| Sequence; Accession No. | | |
| NP_001242.2 | | |
| P. troglodytes Macrosialin | 81 | See FIG. 9 |
| Protein Sequence; Accession | | |
| No. XP_003315403.1 | | |
| B. taurus Macrosialin Protein | 82 | See FIG. 9 |
| Sequence; Accession No. | | |
| NP_001039367.1 | | |
| M. musculus Macrosialin | 83 | See FIG. 9 |
| Protein Sequence; Accession | | |
| No. BAA23738.1 | | |
| M. mulatta Macrosialin | 84 | See FIG. 9 |
| Protein Sequence; Accession | | |
| No. XP_014974003.1 | | |
| R. norvegicus Macrosialin | 85 | See FIG. 9 |
| Protein Sequence; Accession | | |
| No. NP_001026808.1 | | |
| C. lupus familiaris Macrosialin | 86 | See FIG. 9 |
| Protein Sequence; Accession | | |
| No. XP_849733.1 | | |
| E. caballus Macrosialin | 87 | See FIG. 9 |
| Protein Sequence; Accession | | |
| No. NP_001093232.1 | | |
| O. aries Macrosialin Protein | 88 | See FIG. 9 |
| Sequence; Accession No. | | |
| XP_002719034.1 | | |
| S. scrofa Macrosialin Protein | 89 | See FIG. 9 |
| Sequence; Accession No. | | |
| XP_003131995.1 | | |
| 147nubisbis Macrosialin | 90 | See FIG. 9 |
| Protein Sequence; Accession | | |
| No. XP_03912313.1 | | |
| M. domestica Macrosialin | 91 | See FIG. 9 |
| Protein Sequence; Accession | | |
| No. XP_001369761.1 | | |
| O. anatinus Macrosialin | 92 | See FIG. 9 |
| Protein Sequence; Accession | | |
| No. XP_001517723.2 | | |
| H. sapiens LAMP5 Protein | 93 | See FIG. 10 |
| Sequence; Accession No. | | |
| NP_036393.1 | | |
| P. troglodytes LAMP5 Protein | 94 | See FIG. 10 |
| Sequence; Accession No. | | |
| NP_036393.1 | | |
| M. mulatta LAMP5 Protein | 95 | See FIG. 10 |
| Sequence; Accession No. | | |
| NP_001181627.1 | | |
| C. lupus familiaris LAMP5 | 96 | See FIG. 10 |
| Protein Sequence; Accession | | |
| No. XP_850634.1 | | |
| B. taurus LAMP5 Protein | 97 | See FIG. 10 |
| Sequence; Accession No. | | |
| NP_001076887.1 | | |
| M. musculus LAMP5 Protein | 98 | See FIG. 10 |
| Sequence; Accession No. | | |
| NP_083806.2 | | |
| R. norvegicus LAMP5 Protein | 99 | See FIG. 10 |
| Sequence; Accession No. | | |
| NP_001014205.1 | | |
| G. gallus LAMP5 Protein | 100 | See FIG. 10 |
| Sequence; Accession No. | | |
| XP_004935300.1 | | |
| X. tropicalis LAMP5 Protein | 101 | See FIG. 10 |
| Sequence; Accession No. | | |
| NP_001090781.1 | | |
| R. norvegicus LIMBIC/SLAMP | 102 | See FIG. 7 |
| Protein Sequence; Accession | | |
| No. NP_058938.1 | | |
| E. caballus LIMBIC/SLAMP | 103 | See FIG. 7 |
| Protein Sequence; Accession | | |
| No. XP_001502710.1 | | |
| S. scrofa LIMBIC/SLAMP | 104 | See FIG. 7 |
| Protein Sequence; Accession | | |
| No. NP_001231626.1 | | |
| B. taurus LIMBIC/SLAMP | 105 | See FIG. 7 |
| Protein Sequence; Accession | | |
| No. NP_001192297.1 | | |
| A. gambiae LIMBIC/SLAMP | 106 | See FIG. 7 |
| Protein Sequence; Accession | | |
| No. XP_312298.5 | | |
| X. tropicalis LIMBIC/SLAMP | 107 | See FIG. 7 |
| Protein Sequence; Accession | | |
| No. NP_001096385.1 | | |
| C. lupus familiaris | 108 | See FIG. 7 |
| LIMBIC/SLAMP Protein | | |
| Sequence; Accession No. | | |
| XP_003434117.1 | | |
| M. domestica | 109 | See FIG. 7 |
| LIMBIC/SLAMP Protein | | |
| Sequence; Accession No. | | |
| XP_001362972.1 | | |
| G. gallus LIMBIC/SLAMP | 110 | See FIG. 7 |
| Protein Sequence; Accession | | |
| No. NP_990205.1 | | |
| T. guttate LIMBIC/SLAMP | 111 | See FIG. 7 |
| Protein Sequence; Accession | | |
| No. XP_002190582.1 | | |
| X. tropicalis LIMBIC/SLAMP | 112 | See FIG. 7 |
| Protein Sequence; Accession | | |
| No. NP_001096385.1 | | |
| O. niloticus LIMBIC/SLAMP | 113 | See FIG. 7 |
| Protein Sequence; Accession | | |
| No. XP_003449349.1 | | |
| Exemplary LAMP Signal | 114 | MAPRSARRPLLLLLLLLLLGLMHCASA |
| Sequence; Protein Sequence | | |
| N-LAMP Protein Sequence | 115 | AMFMVKNGNGTACIMANFSAAFSVNYDTKSGPKNMTLDLPSDATVVLNRSSCGKENTSDPSLVIAFGRGHTLTLNFTRN |
| | | ATRYSVQLMSFVYNLSDTHLFPNASSKEIKTVESITDIRADIDKKYRCVSGTQVHMNNVTVTLHDATIQAYLSNSSFSR |
| | | GETRCEQD |
| C-LAMP Protein Sequence | 116 | ADPHRCGWCPGGAGPHRPHRLPRRQEEESRRLPDYL |
| TM Cyto LAMP Protein | 117 | LIPIAVGGALAGLVLIVLIAYLVGRKRSHAGYQTI |
| Sequence | | |
| SARS CoV-2 S1 Spike | 118 | VNLTTRTQLPPAYTNSFTRGVYYPDKVFRSSVLHSTQDLFLPFFSNVTWFHAIHVSGTNGTKRFDNPVLPFNDGVYFAS |
| Protein Sequence | | TEKSNIIRGWIFGTTLDSKTQSLLIVNNATNVVIKVCEFQFCNDPFLGVYYHKNNKSWMESEFRVYSSANNCTFEYVSQ |
| | | PFLMDLEGKQGNFKNLREFVFKNIDGYFKIYSKHTPINLVRDLPQGFSALEPLVDLPIGINITRFQTLLALHRSYLTPG |
| | | DSSSGWTAGAAAYYVGYLQPRTFLLKYNENGTITDAVDCALDPLSETKCTLKSFTVEKGIYQTSNFRVQPTESIVRFPN |
| | | ITNLCPFGEVFNATRFASVYAWNRKRISNCVADYSVLYNSASFSTFKCYGVSPTKLNDLCFTNVYADSFVIRGDEVRQI |
| | | APGQTGKIADYNYKLPDDFTGCVIAWNSNNLDSKVGGNYNYLYRLFRKSNLKPFERDISTEIYQAGSTPCNGVEGENCY |
| | | FPLQSYGFQPTNGVGYQPYRVVVLSFELLHAPATVCGPKKSTNLVKNKCVNFNFNGLTGTGVLTESNKKFLPFQQFGRD |
| | | IADTTDAVRDPQTLEILDITPCSFGGVSVITPGTNTSNQVAVLYQDVNCTEVPVAIHADQLTPTWRVYSTGSNVFQTRA |
| | | GCLIGAEHVNNSYECDIPIGAGICASYQTQTNSPRRAR |
| Exemplary SARS CoV-2 | 119 | VNLTTRTQLPPAYTNSFTRGVYYPDKVFRSSVLHSTQDLFLPFFSNVTWFHAIHVSGTNGTKRFDNPVLPFNDGVYFAS |
| Spike Protein Sequence (16- | | TEKSNIIRGWIFGTTLDSKTQSLLIVNNATNVVIKVCEFQFCNDPFLGVYYHKNNKSWMESEFRVYSSANNCTFEYVSQ |
| 1273) | | PFLMDLEGKQGNFKNLREFVFKNIDGYFKIYSKHTPINLVRDLPQGFSALEPLVDLPIGINITRFQTLLALHRSYLTPG |
| | | DSSSGWTAGAAAYYVGYLQPRTFLLKYNENGTITDAVDCALDPLSETKCTLKSFTVEKGIYQTSNFRVQPTESIVRFPN |
| | | ITNLCPFGEVFNATRFASVYAWNRKRISNCVADYSVLYNSASFSTFKCYGVSPTKLNDLCFTNVYADSFVIRGDEVRQI |
| | | APGQTGKIADYNYKLPDDFTGCVIAWNSNNLDSKVGGNYNYLYRLFRKSNLKPFERDISTEIYQAGSTPCNGVEGENCY |
| | | FPLQSYGFQPTNGVGYQPYRVVVLSFELLHAPATVCGPKKSTNLVKNKCVNFNFNGLTGTGVLTESNKKFLPFQQFGRD |
| | | IADTTDAVRDPQTLEILDITPCSFGGVSVITPGTNTSNQVAVLYQDVNCTEVPVAIHADQLTPTWRVYSTGSNVFQTRA |
| | | GCLIGAEHVNNSYECDIPIGAGICASYQTQTNSPRRARSVASQSIIAYTMSLGAENSVAYSNNSIAIPTNFTISVTTEI |
| | | LPVSMTKTSVDCTMYICGDSTECSNLLLQYGSFCTQLNRALTGIAVEQDKNTQEVFAQVKQIYKTPPIKDFGGFNFSQI |
| | | LPDPSKPSKRSFIEDLLFNKVTLADAGFIKQYGDCLGDIAARDLICAQKFNGLTVLPPLLTDEMIAQYTSALLAGTITS |
| | | GWTFGAGAALQIPFAMQMAYRFNGIGVTQNVLYENQKLIANQFNSAIGKIQDSLSSTASALGKLQDVVNQNAQALNTLV |
| | | KQLSSNFGAISSVLNDILSRLDPPEAEVQIDRLITGRLQSLQTYVTQQLIRAAEIRASANLAATKMSECVLGQSKRVDF |
| | | CGKGYHLMSFPQSAPHGVVFLHVTYVPAQEKNFTTAPAICHDGKAHFPREGVFVSNGTHWFVTQRNFYEPQIITTDNTF |
| | | VSGNCDVVIGIVNNTVYDPLQPELDSFKEELDKYFKNHTSPDVDLGDISGINASVVNIQKEIDRLNEVAKNLNESLIDL |
| | | QELGKYEQYIKWPWYIWLGFIAGLIAIVMVTIMLCCMTSCCSCLKGCCSCGSCCKFDEDDSEPVLKGVKLHYT |
| Murine Ig-Kappa Leader; | 120 | METDTLLLWVLLLWVPGSTGD |
| Protein Sequence | | |
| Murine Ig-Kappa Leader; | 121 | atggaaaccgatacactgctgctgtgggtgctgttgctctgggttccaggatctacaggcgac |
| DNA Sequence | | |
| Human IgKVIII Leader; | 122 | MDMRVPAQLLGLLLLWLRGARC |
| Protein Sequence | | |
| Human IgKVIII Leader; | 123 | atggacatgcgtgtgccggcccaactgcttggtttgctgctcctctggcttcggggcgcaagatgc |
| DNA Sequence | | |
| Human EF-1alpha Core | 124 | gggcagagcgcacatcgcccacagtccccgagaagttggggggaggggtcggcaattgaaccggtgcctagagaaggtg |
| Promoter; DNA Sequence | | gcgcggggtaaactgggaaagtgatgtcgtgtactggctccgcctttttcccgagggtgggggagaaccgtatataagt |
| | | gcagtagtcgccgtgaacgttctttttcgcaacgggtttgccgccagaacacag |
| Human Tetranectin; Protein | 125 | EPPTQKPKKIVNAKKDVVNTKMFEELKSRLDTLAQEVALLKEQQALQTV |
| Sequence | | |
| Human Tetranectin; DNA | 126 | gagccaccaacccagaagcccaagaagattgtaaatgccaagaaagatgttgtgaacacaaagatgtttgaggagctca |
| Sequence | | agagccgtctggacaccctggcccaggaggtggccctgctgaaggagcagcaggccctgcagacggtc |
| Murine Tetranectin; Protein | 127 | ESPTPKAKKAANAKKDLVSSKMFEELKNRMDVLAQEVALLKEKQALQTV |
| Sequence | | |
| Murine Tetranectin; DNA | 128 | gagtcacccactcccaaggccaagaaggctgcaaatgccaagaaagatttggtgagctcaaagatgttcgaggagctca |
| Sequence | | agaacaggatggatgtcctggcccaggaggtggccctgctgaaggagaagcaggccttacagactgtg |
| Murine Pulmonary Surfactant | 129 | MLPFLSMLVLLVQPLGNLGAEMKSLSQRSVPNTCTLVMCSPTENGLPGRDGRDGREGPRGEKGDPGLPGPMGLSGLQGP |
| Associated Protein D (SPD); | | TGPVGPKGENGSAGEPGPKGERGLSGPPGLPGIPGPAGKEGPSGKQGNIGPQGKPGPKGEAGPKGEVGAPGMQGSTGAK |
| Protein Sequence | | GSTGPKGERGAPGVQGAPGNAGAAGPAGPAGPQGAPGSRGPPGLKGDRGVPGDRGIKGESGLPDSAALRQQMEALKGKL |
| | | QRLEVAFSHYQKAALFPDG |
| Murine Pulmonary Surfactant | 130 | atgctgccctttctctccatgcttgtcttgcttgtacagcccctgggaaatctgggagcagaaatgaagagcctctcgc |
| Associated Protein D (SPD); | | agagatcagtacccaacacctgcaccctagtcatgtgtagcccaacagagaatggcctgcctggtcgtgatggacggga |
| DNA Sequence | | tgggagagaaggtccacggggtgagaagggtgatccaggtttgccaggacctatggggctctcagggttgcagggccct |
| | | acaggtccagttggacccaaaggagagaatggctctgctggcgaacctggaccaaagggagaacgtggactaagtggac |
| | | ctccaggacttccaggtattcctggtccagctgggaaagaaggtccctctgggaagcaggggaacataggacctcaagg |
| | | caaaccaggtcctaaaggagaggctgggcccaaaggagaagtaggtgctcctggcatgcaaggatctacaggggcaaaa |
| | | ggctccacaggccccaagggagaaagaggtgcccctggtgtgcaaggagccccagggaatgctggagcagcaggacctg |
| | | ccggacctgccggtccacagggagctccaggttccagggggcccccaggactcaagggggacagaggtgttcctggaga |
| | | cagaggaatcaaaggtgaaagcgggcttccagacagtgctgctctgaggcagcagatggaggccttaaaaggaaaacta |
| | | cagcgtctagaggttgccttctcccactatcagaaagctgcattgttccctgatggc |
| Human Pulmonary | 131 | MLLFLLSALVLLTQPLGYLEAEMKTYSHRIMPSACTLVMCSSVESGLPGRDGRDGREGPRGEKGDPGLPGAAGQAGMPG |
| Surfactant Associated Protein | | QAGPVGPKGDNGSVGEPGPKGDTGPSGPPGPPGVPGPAGREGPLGKQGNIGPQGKPGPKGEAGPKGEVGAPGMQGSAGA |
| D (SPD); Protein Sequence | | RGLAGPKGERGVPGERGVPGNTGAAGSAGAMGPQGSPGARGPPGLKGDKGIPGDKGAKGESGLPDVASLRQQVEALQGQ |
| | | VQHLQAAFSQYKKVELFPNGQSVGEKIFKTAGFVKPFTEAQLLCTQAGGQLASPRSAAENAALQQLVVAKNEAAFLSMT |
| | | DSKTEGKFTYPTGESLVYSNWAPGEPNDDGGSEDCVEIFTNGKWNDRACGEKRLVVCEF |
| Human Pulmonary | 132 | atgctgctcttcctcctctctgcactggtcctgctcacacagcccctgggctacctggaagcagaaatgaagacctact |
| Surfactant Associated Protein | | cccacagaacaatgcccagtgcttgcaccctggtcatgtgtagctcagtggagagtggcctgcctggtcgcgatggacg |
| D (SPD); DNA Sequence | | ggatgggagagagggccctcggggcgagaagggggacccaggtttgccaggagctgcagggcaagcagggatgcctgga |
| | | caagctggcccagttgggcccaaaggggacaatggctctgttggagaacctggaccaaagggagacactgggccaagtg |
| | | gacctccaggacctcccggtgtgcctggtccagctggaagagaaggtcccctggggaagcaggggaacataggacctca |
| | | gggcaagccaggcccaaaaggagaagctgggcccaaaggagaagtaggtgccccaggcatgcagggctcggcaggggca |
| | | agaggcctcgcaggccctaagggagagcgaggtgtccctggtgagcgtggagtccctggaaacacaggggcagcagggt |
| | | ctgctggagccatgggtccccagggaagtccaggtgccaggggacccccgggattgaagggggacaaaggcattcctgg |
| | | agacaaaggagcaaagggagaaagtgggcttccagatgttgcttctctgaggcagcaggttgaggccttacagggacaa |
| | | gtacagcacctccaggctgctttctctcagtataagaaagttgagctcttcccaaatggccaaagtgtcggggagaaga |
| | | ttttcaagacagcaggctttgtaaaaccatttacggaggcacagctgctgtgcacacaggctggtggacagttggcctc |
| | | tccacgctctgccgctgagaatgccgccttgcaacagctggtcgtagctaagaacgaggctgctttcctgagcatgact |
| | | gattccaagacagagggcaagttcacctaccccacaggagagtccctggtctattccaactgggccccaggggagccca |
| | | acgatgatggcgggtcagaggactgtgtggagatcttcaccaatggcaagtggaatgacagggcttgtggagaaaagcg |
| | | tcttgtggtctgcgagttc |
| Human Soluble CD70; | 133 | QRFAQAQQQLPLESLGWDVAELQLNHTGPQQDPRLYWQGGPALGRSFLHGPELDKGQLRIHRDGIYMVHIQVTLAICSS |
| Protein Sequence | | TTASRHHPTTLAVGICSPASRSISLLRLSFHQGCTIASQRLTPLARGDTLCTNLTGTLLPSRNTDETFFGVQWVRP |
| Human Soluble CD70; DNA | 134 | cagcgcttcgcacaggctcagcagcagctgccgctcgagtcacttgggtgggacgtagctgagctgcagctgaatcaca |
| Sequence | | caggacctcagcaggaccccaggctatactggcaggggggcccagcactgggccgctccttcctgcatggaccagagct |
| | | ggacaaggggcagctacgtatccatcgtgatggcatctacatggtacacatccaggtgacgctggccatctgttcctcc |
| | | acgacggcctccaggcaccaccccaccaccctggccgtgggaatctgctctcccgcctcccgtagcatcagcctgctgc |
| | | gtctcagcttccaccaaggttgtaccattgcctcccagcgcctgacgcccctggcccgaggggacacactctgcaccaa |
| | | cctcactgggacacttttgccttcccgaaacactgatgagaccttctttggagtgcagtgggtgcgcccc |
| Murine Soluble CD70; | 135 | SKQQQRLLEHPEPHTAELQLNLTVPRKDPTLRWGAGPALGRSFTHGPELEEGHLRIHQDGLYRLHIQVTLANCSSPGST |
| Protein Sequence | | LQHRATLAVGICSPAAHGISLLRGRFGQDCTVALQRLTYLVHGDVLCTNLTLPLLPSRNADETFFGVQWICP |
| Murine Soluble CD70; DNA | 136 | agtaagcagcaacagaggctgctggagcaccctgagccgcacacagctgagttacagctgaatctcacagttcctcgga |
| Sequence | | aggaccccacactgcgctggggagcaggcccagccttgggaaggtccttcacacacggaccagagctggaggagggcca |
| | | tctgcgtatccatcaagatggcctctacaggctgcatatccaggtgacactggccaactgctcttccccaggcagcacc |
| | | ctgcagcacagggccaccctggctgtgggcatctgctcccccgctgcgcacggcatcagcttgctgcgtgggcgctttg |
| | | gacaggactgtacagtggcattacagcgcctgacatacctggtccacggagatgtcctctgtaccaacctcaccctgcc |
| | | tctgctgccgtcccgcaacgctgatgagaccttctttggagttcagtggatatgccct |
| Murine IL-12p35-P2A-IL- | 137 | MVSVPTASPSASSSSSQCRSSMCQSRYLLFLATLALLNHLSLARVIPVSGPARCLSQSRNLLKTTDDMVKTAREKLKHY |
| 12p40; Protein Sequence | | SCTAEDIDHEDITRDQTSTLKTCLPLELHKNESCLATRETSSTTRGSCLPPQKTSLMMTLCLGSIYEDLKMYQTEFQAI |
| | | NAALQNHNHQQIILDKGMLVAIDELMQSLNHNGETLRQKPPVGEADPYRVKMKLCILLHAFSTRVVTINRVMGYLSSAA |
| | | AAGSGATNFSLLKQAGDVEENPGPGSCPQKLTISWFAIVLLVSPLMAMWELEKDVYVVEVDWTPDAPGETVNLTCDTPE |
| | | EDDITWTSDQRHGVIGSGKTLTITVKEFLDAGQYTCHKGGETLSHSHLLLHKKENGIWSTEILKNFKNKTFLKCEAPNY |
| | | SGRFTCSWLVQRNMDLKFNIKSSSSSPDSRAVTCGMASLSAEKVTLDQRDYEKYSVSCQEDVTCPTAEETLPIELALEA |
| | | RQQNKYENYSTSFFIRDIIKPDPPKNLQMKPLKNSQVEVSWEYPDSWSTPHSYFSLKFFVRIQRKKEKMKETEEGCNQK |
| | | GAFLVEKTSTEVQCKGGNVCVQAQDRYYNSSCSKWACVPCRVRS |
| Murine IL-12p35-P2A-IL- | 138 | atggtcagcgttccaacagcctcaccctcggcatccagcagctcctctcagtgccggtccagcatgtgtcaatcacgct |
| 12p40; DNA Sequence | | acctcctctttttggccacccttgccctcctaaaccacctcagtttggccagggtcattccagtctctggacctgccag |
| | | gtgtcttagccagtcccgaaacctgctgaagaccacagatgacatggtgaagacggccagagaaaaactgaaacattat |
| | | tcctgcactgctgaagacatcgatcatgaagacatcacacgggaccaaaccagcacattgaagacctgtttaccactgg |
| | | aactacacaagaacgagagttgcctggctactagagagacttcttccacaacaagagggagctgcctgcccccacagaa |
| | | gacgtctttgatgatgaccctgtgccttggtagcatctatgaggacttgaagatgtaccagacagagttccaggccatc |
| | | aacgcagcacttcagaatcacaaccatcagcagatcattcttgacaagggcatgctggtggccatcgatgagctgatgc |
| | | agtctctgaatcataatggcgagactctgcgccagaaacctcctgtgggagaagcagacccttacagagtgaaaatgaa |
| | | gctctgcatcctgcttcacgccttcagcacccgcgtcgtgaccatcaacagggtgatgggctatctgagctccgccgcg |
| | | gccgcaggatctggggccaccaacttttcattgctcaagcaggcgggcgatgtggaggaaaaccctggccccggatcct |
| | | gtcctcagaagctaaccatctcctggtttgccatcgttttgctggtgtctccactcatggccatgtgggagctggagaa |
| | | agacgtttatgttgtagaggtggactggactcccgatgcccctggagaaacagtgaacctcacctgtgacacgcctgaa |
| | | gaagatgacatcacctggacctcagaccagagacatggagtcataggctctggaaagaccctgaccatcactgtcaaag |
| | | agtttcttgatgctggccagtacacctgccacaaaggaggcgagactctgagccactcacatctgctgctccacaagaa |
| | | ggaaaatggaatttggtccactgaaattttaaagaatttcaagaacaagactttcctgaagtgtgaagcaccaaattac |
| | | tccggacggttcacgtgctcatggctggtgcaaagaaacatggacttgaagttcaacatcaagagcagtagcagttccc |
| | | ctgactctcgggcagtgacatgtggaatggcgtctctgtctgcagagaaggtcacactggaccaaagggactatgagaa |
| | | gtattcagtgtcctgccaggaggatgtcacctgcccaactgccgaggagaccctgcccattgaactggcgttggaagca |
| | | cggcagcagaataaatatgagaactacagcaccagcttcttcatcagggacatcatcaaaccagacccgcccaagaact |
| | | tgcagatgaagcctttgaagaactcacaggtggaggtcagctgggagtaccctgactcctggagcactccccattccta |
| | | cttctccctcaagttctttgttcgaatccagcgcaagaaagaaaagatgaaggagacagaggaggggtgtaaccagaaa |
| | | ggtgcgttcctcgtagagaagacatctaccgaagtccaatgcaaaggcgggaatgtctgcgtgcaagctcaggatcgct |
| | | attacaattcctcatgcagcaagtgggcatgtgttccctgcagggtccgatcctag |
| Murine IL-12p35 Protein | 139 | MVSVPTASPSASSSSSQCRSSMCQSRYLLFLATLALLNHLSLARVIPVSGPARCLSQSRNLLKTTDDMVKTAREKLKHY |
| Sequence | | SCTAEDIDHEDITRDQTSTLKTCLPLELHKNESCLATRETSSTTRGSCLPPQKTSLMMTLCLGSIYEDLKMYQTEFQAI |
| | | NAALQNHNHQQIILDKGMLVAIDELMQSLNHNGETLRQKPPVGEADPYRVKMKLCILLHAFSTRVVTINRVMGYLSSAA |
| | | AA |
| Murine IL-12p35 DNA | 140 | atggtcagcgttccaacagcctcaccctcggcatccagcagctcctctcagtgccggtccagcatgtgtcaatcacgct |
| Sequence | | acctcctctttttggccacccttgccctcctaaaccacctcagtttggccagggtcattccagtctctggacctgccag |
| | | gtgtcttagccagtcccgaaacctgctgaagaccacagatgacatggtgaagacggccagagaaaaactgaaacattat |
| | | tcctgcactgctgaagacatcgatcatgaagacatcacacgggaccaaaccagcacattgaagacctgtttaccactgg |
| | | aactacacaagaacgagagttgcctggctactagagagacttcttccacaacaagagggagctgcctgcccccacagaa |
| | | gacgtctttgatgatgaccctgtgccttggtagcatctatgaggacttgaagatgtaccagacagagttccaggccatc |
| | | aacgcagcacttcagaatcacaaccatcagcagatcattcttgacaagggcatgctggtggccatcgatgagctgatgc |
| | | agtctctgaatcataatggcgagactctgcgccagaaacctcctgtgggagaagcagacccttacagagtgaaaatgaa |
| | | gctctgcatcctgcttcacgccttcagcacccgcgtcgtgaccatcaacagggtgatgggctatctgagctccgccgcg |
| | | gccgca |
| Exemplary P2A Protein | 141 | GSGATNFSLLKQAGDVEENPGPG |
| Sequence | | |
| Exemplary P2A DNA | 142 | ggatctggggccaccaacttttcattgctcaagcagggggcgatgtggaggaaaaccctggccccgga |
| Sequence | | |
| IL-12p40 Protein Sequence | 143 | SCPQKLTISWFAIVLLVSPLMAMWELEKDVYVVEVDWTPDAPGETVNLTCDTPEEDDITWTSDQRHGVIGSGKTLTITV |
| | | KEFLDAGQYTCHKGGETLSHSHLLLHKKENGIWSTEILKNFKNKTFLKCEAPNYSGRFTCSWLVQRNMDLKFNIKSSSS |
| | | SPDSRAVTCGMASLSAEKVTLDQRDYEKYSVSCQEDVTCPTAEETLPIELALEARQQNKYENYSTSFFIRDIIKPDPPK |
| | | NLQMKPLKNSQVEVSWEYPDSWSTPHSYFSLKFFVRIQRKKEKMKETEEGCNQKGAFLVEKTSTEVQCKGGNVCVQAQD |
| | | RYYNSSCSKWACVPCRVRS |
| IL-12p40 DNA Sequence | 144 | atcctgtcctcagaagctaaccatctcctggtttgccatcgttttgctggtgtctccactcatggccatgtgggagctg |
| | | gagaaagacgtttatgttgtagaggtggactggactcccgatgcccctggagaaacagtgaacctcacctgtgacacgc |
| | | ctgaagaagatgacatcacctggacctcagaccagagacatggagtcataggctctggaaagaccctgaccatcactgt |
| | | caaagagtttcttgatgctggccagtacacctgccacaaaggaggcgagactctgagccactcacatctgctgctccac |
| | | aagaaggaaaatggaatttggtccactgaaattttaaagaatttcaagaacaagactttcctgaagtgtgaagcaccaa |
| | | attactccggacggttcacgtgctcatggctggtgcaaagaaacatggacttgaagttcaacatcaagagcagtagcag |
| | | ttcccctgactctcgggcagtgacatgtggaatggcgtctctgtctgcagagaaggtcacactggaccaaagggactat |
| | | gagaagtattcagtgtcctgccaggaggatgtcacctgcccaactgccgaggagaccctgcccattgaactggcgttgg |
| | | aagcacggcagcagaataaatatgagaactacagcaccagcttcttcatcagggacatcatcaaaccagacccgcccaa |
| | | gaacttgcagatgaagcctttgaagaactcacaggtggaggtcagctgggagtaccctgactcctggagcactccccat |
| | | tcctacttctccctcaagttctttgttcgaatccagcgcaagaaagaaaagatgaaggagacagaggaggggtgtaacc |
| | | agaaaggtgcgttcctcgtagagaagacatctaccgaagtccaatgcaaaggcgggaatgtctgcgtgcaagctcagga |
| | | tcgctattacaattcctcatgcagcaagtgggcatgtgttccctgcagggtccgatcctag |
| Human IL-12p35-P2A-IL- | 145 | MCPARSLLLVATLVLLDHLSLARNLPVATPDPGMFPCLHHSQNLLRAVSNMLQKARQTLEFYPCTSEEIDHEDITKDKT |
| 12p40 Protein Sequence | | STVEACLPLELTKNESCLNSRETSFITNGSCLASRKTSFMMALCLSSIYEDLKMYQVEFKTMNAKLLMDPKRQIFLDQN |
| | | MLAVIDELMQALNFNSETVPQKSSLEEPDFYKTKIKLCILLHAFRIRAVTIDRVMSYLNASATNFSLLKQAGDVEENPG |
| | | PGMCHQQLVISWFSLVFLASPLVAIWELKKDVYVVELDWYPDAPGEMVVLTCDTPEEDGITWTLDQSSEVLGSGKTLTI |
| | | QVKEFGDAGQYTCHKGGEVLSHSLLLLHKKEDGIWSTDILKDQKEPKNKTFLRCEAKNYSGRFTCWWLTTISTDLTFSV |
| | | KSSRGSSDPQGVTCGAATLSAERVRGDNKEYEYSVECQEDSACPAAEESLPIEVMVDAVHKLKYENYTSSFFIRDIIKP |
| | | DPPKNLQLKPLKNSRQVEVSWEYPDTWSTPHSYFSLTFCVQVQGKSKREKKDRVFTDKTSATVICRKNASISVRAQDRY |
| | | YSSSWSEWASVPCS |
| Human IL-12p35-P2A-IL- | 146 | atgtgcccggcgcgcagcctgctgctggtggcgaccctggtgctgctggatcatctgagcctggcgcgcaacctgccgg |
| 12p40 DNA Sequence | | tggcgaccccggatccgggcatgtttccgtgcctgcatcatagccagaacctgctgcgcgcggtgagcaacatgctgca |
| | | gaaagcgcgccagaccctggaattttatccgtgcaccagcgaagaaattgatcatgaagatattaccaaagataaaacc |
| | | agcaccgtggaagcgtgcctgccgctggaactgaccaaaaacgaaagctgcctgaacagccgcgaaaccagctttatta |
| | | ccaacggcagctgcctggcgagccgcaaaaccagctttatgatggcgctgtgcctgagcagcatttatgaagatctgaa |
| | | aatgtatcaggtggaatttaaaaccatgaacgcgaaactgctgatggatccgaaacgccagatttttctggatcagaac |
| | | atgctggcggtgattgatgaactgatgcaggcgctgaactttaacagcgaaaccgtgccgcagaaaagcagcctggaag |
| | | aaccggatttttataaaaccaaaattaaactgtgcattctgctgcatgcgtttcgcattcgcgcggtgaccattgatcg |
| | | cgtgatgagctatctgaacgcgagcgcgaccaactttagcctgctgaaacaggcgggcgatgtggaagaaaacccgggc |
| | | ccgggcatgtgccatcagcagctggtgattagctggtttagcctggtgtttctggcgagcccgctggtggcgatttggg |
| | | aactgaaaaaagatgtgtatgtggtggaactggattggtatccggatgcgccgggcgaaatggtggtgctgacctgcga |
| | | taccccggaagaagatggcattacctggaccctggatcagagcagcgaagtgctgggcagcggcaaaaccctgaccatt |
| | | caggtgaaagaatttggcgatgcgggccagtatacctgccataaaggcggcgaagtgctgagccatagcctgctgctgc |
| | | tgcataaaaaagaagatggcatttggagcaccgatattctgaaagatcagaaagaaccgaaaaacaaaacctttctgcg |
| | | ctgcgaagcgaaaaactatagcggccgctttacctgctggtggctgaccaccattagcaccgatctgacctttagcgtg |
| | | aaaagcagccgcggcagcagcgatccgcagggcgtgacctgcggcgcggcgaccctgagcgcggaacgcgtgcgcggcg |
| | | ataacaaagaatatgaatatagcgtggaatgccaggaagatagcgcgtgcccggcggcggaagaaagcctgccgattga |
| | | agtgatggtggatgcggtgcataaactgaaatatgaaaactataccagcagcttttttattcgcgatattattaaaccg |
| | | gatccgccgaaaaacctgcagctgaaaccgctgaaaaacagccgccaggtggaagtgagctgggaatatccggatacct |
| | | ggagcaccccgcatagctattttagcctgaccttttgcgtgcaggtgcagggcaaaagcaaacgcgaaaaaaaagatcg |
| | | cgtgtttaccgataaaaccagcgcgaccgtgatttgccgcaaaaacgcgagcattagcgtgcgcgcgcaggatcgctat |
| | | tatagcagcagctggagcgaatgggcgagcgtgccgtgcagc |
| Human IL-12p35 Protein | 147 | MCPARSLLLVATLVLLDHLSLARNLPVATPDPGMFPCLHHSQNLLRAVSNMLQKARQTLEFYPCTSEEIDHEDITKDKT |
| Sequence | | STVEACLPLELTKNESCLNSRETSFITNGSCLASRKTSFMMALCLSSIYEDLKMYQVEFKTMNAKLLMDPKRQIFLDQN |
| | | MLAVIDELMQALNFNSETVPQKSSLEEPDFYKTKIKLCILLHAFRIRAVTIDRVMSYLNAS |
| Human IL-12p35 DNA | 148 | atgtgcccggcgcgcagcctgctgctggtggcgaccctggtgctgctggatcatctgagcctggcgcgcaacctgccgg |
| Sequence | | tggcgaccccggatccgggcatgtttccgtgcctgcatcatagccagaacctgctgcgcgcggtgagcaacatgctgca |
| | | gaaagcgcgccagaccctggaattttatccgtgcaccagcgaagaaattgatcatgaagatattaccaaagataaaacc |
| | | agcaccgtggaagcgtgcctgccgctggaactgaccaaaaacgaaagctgcctgaacagccgcgaaaccagctttatta |
| | | ccaacggcagctgcctggcgagccgcaaaaccagctttatgatggcgctgtgcctgagcagcatttatgaagatctgaa |
| | | aatgtatcaggtggaatttaaaaccatgaacgcgaaactgctgatggatccgaaacgccagatttttctggatcagaac |
| | | atgctggcggtgattgatgaactgatgcaggcgctgaactttaacagcgaaaccgtgccgcagaaaagcagcctggaag |
| | | aaccggatttttataaaaccaaaattaaactgtgcattctgctgcatgcgtttcgcattcgcgcggtgaccattgatcg |
| | | cgtgatgagctatctgaacgcgagc |
| Human IL-12p40 Protein | 149 | MCHQQLVISWFSLVFLASPLVAIWELKKDVYVVELDWYPDAPGEMVVLTCDTPEEDGITWTLDQSSEVLGSGKTLTIQV |
| Sequence | | KEFGDAGQYTCHKGGEVLSHSLLLLHKKEDGIWSTDILKDQKEPKNKTFLRCEAKNYSGRFTCWWLTTISTDLTFSVKS |
| | | SRGSSDPQGVTCGAATLSAERVRGDNKEYEYSVECQEDSACPAAEESLPIEVMVDAVHKLKYENYTSSFFIRDIIKPDP |
| | | PKNLQLKPLKNSRQVEVSWEYPDTWSTPHSYFSLTFCVQVQGKSKREKKDRVFTDKTSATVICRKNASISVRAQDRYYS |
| | | SSWSEWASVPCS |
| Human IL-12p40 DNA | 150 | atgtgccatcagcagctggtgattagctggtttagcctggtgtttctggcgagcccgctggtggcgatttgggaactga |
| Sequence | | aaaaagatgtgtatgtggtggaactggattggtatccggatgcgccgggcgaaatggtggtgctgacctgcgatacccc |
| | | ggaagaagatggcattacctggaccctggatcagagcagcgaagtgctgggcagcggcaaaaccctgaccattcaggtg |
| | | aaagaatttggcgatgcgggccagtatacctgccataaaggcggcgaagtgctgagccatagcctgctgctgctgcata |
| | | aaaaagaagatggcatttggagcaccgatattctgaaagatcagaaagaaccgaaaaacaaaacctttctgcgctgcga |
| | | agcgaaaaactatagcggccgctttacctgctggtggctgaccaccattagcaccgatctgacctttagcgtgaaaagc |
| | | agccgcggcagcagcgatccgcagggcgtgacctgcggcgcggcgaccctgagcgcggaacgcgtgcgcggcgataaca |
| | | aagaatatgaatatagcgtggaatgccaggaagatagcgcgtgcccggcggcggaagaaagcctgccgattgaagtgat |
| | | ggtggatgcggtgcataaactgaaatatgaaaactataccagcagcttttttattcgcgatattattaaaccggatccg |
| | | ccgaaaaacctgcagctgaaaccgctgaaaaacagccgccaggtggaagtgagctgggaatatccggatacctggagca |
| | | ccccgcatagctattttagcctgaccttttgcgtgcaggtgcagggcaaaagcaaacgcgaaaaaaaagatcgcgtgtt |
| | | taccgataaaaccagcgcgaccgtgatttgccgcaaaaacgcgagcattagcgtgcgcgcgcaggatcgctattatagc |
| | | agcagctggagcgaatgggcgagcgtgccgtgcagc |
| Human FLT3L Protein | 151 | TQDCSFQHSPISSDFAVKIRELSDYLLQDYPVTVASNLQDEELCGGLWRLVLAQRWMERLKTVAGSKMQGLLERVNTEI |
| Sequence | | HFVTKCAFQPPPSCLRFVQTNISRLLQETSEQLVALKPWITRQNFSRCLELQCQPDSSTLPPPWSPRPLEATAPTAPQP |
| Human FLT3L DNA | 152 | atgacagtgctggcgccagcctggagcccaacaacctatctcctcctgctgctgctgctgagctcgggactcagtggga |
| Sequence | | cccaggactgctccttccaacacagccccatctcctccgacttcgctgtcaaaatccgtgagctgtctgactacctgct |
| | | tcaagattacccagtcaccgtggcctccaacctgcaggacgaggagctctgcgggggcctctggcggctggtcctggca |
| | | cagcgctggatggagcggctcaagactgtcgctgggtccaagatgcaaggcttgctggagcgcgtgaacacggagatac |
| | | actttgtcaccaaatgtgcctttcagccc |
| Murine OX40L Protein | 153 | SSSPAKDPPIQRLRGAVTRCEDGQLFISSYKNEYQTMEVQNNSVVIKCDGLYIIYLKGSFFQEVKIDLHFREDHNPISI |
| Sequence | | PMLNDGRRIVFTVVASLAFKDKVYLTVNAPDTLCEHLQINDGELIVVQLTPGYCAPEGSYHSTVNQVPL |
| Murine OX40L DNA | 154 | agcagcagccctgccaaggaccctcctattcagaggctgaggggcgccgtgacaaggtgcgaggacggacagctgttca |
| Sequence | | tcagcagctacaagaacgagtatcagaccatggaggtgcagaacaacagcgtggtgatcaagtgcgacggcctgtacat |
| | | catctacctgaagggcagcttcttccaagaggtgaagatcgacctgcactttagggaggaccacaaccctatcagcatc |
| | | cctatgctgaacgacggaaggaggatcgtgttcaccgtggtggctagcctggccttcaaggacaaggtgtacctgaccg |
| | | tgaacgcccctgacaccctgtgcgagcacctgcagatcaacgacggcgagctgatcgtggtgcagctgacccctggcta |
| | | ctgcgcccctgagggcagctaccacagcaccgtgaaccaagtgcctctg |
| Human OX40L Protein | 155 | QVSHRYPRIQSIKVQFTEYKKEKGFILTSQKEDEIMKVQNNSVIINCDGFYLISLKGYFSQEVNISLHYQKDEEPLFQL |
| Sequence | | KKVRSVNSLMVASLTYKDKVYLNVTTDNTSLDDFHVNGGELILIHQNPGEFCVL |
| Human OX40L DNA | 156 | caggtatcacatcggtatcctcgaattcaaagtatcaaagtacaatttaccgaatataagaaggagaaaggtttcatcc |
| Sequence | | tcacttcccaaaaggaggatgaaatcatgaaggtgcagaacaactcagtcatcatcaactgtgatgggttttatctcat |
| | | ctccctgaagggctacttctcccaggaagtcaacattagccttcattaccagaaggatgaggagcccctcttccaactg |
| | | aagaaggtcaggtctgtcaactccttgatggtggcctctctgacttacaaagacaaagtctacttgaatgtgaccactg |
| | | acaatacctccctggatgacttccatgtgaatggcggagaactgattcttatccatcaaaatcctggtgaattctgtgt |
| | | cctt |
| Murine CD80 Protein | 157 | VDEQLSKSVKDKVLLPCRYNSPHEDESEDRIYWQKHDKVVLSVIAGKLKVWPEYKNRTLYDNTTYSLIILGLVLSDRGT |
| Sequence | | YSCVVQKKERGTYEVKHLALVKLSIKADFSTPNITESGNPSADTKRITCFASGGFPKPRFSWLENGRELPGINTTISQD |
| | | PESELYTISSQLDFNTTRNHTIKCLIKYGDAHVSEDFTWEKPPEDPPDSKN |
| Murine CD80 DNA | 158 | Gtggacgagcagctgagcaagagcgtgaaggacaaggtgctgctgccttgtaggtacaacagccctcacgaggacgaga |
| Sequence | | gcgaggataggatctactggcagaagcacgacaaggtagtgctgagtgtgatagccggcaagctgaaggtgtggcctga |
| | | gtacaagaataggaccctgtacgacaacaccacctacagcctgatcatcctgggcctggtgctgagcgataggggtacc |
| | | tacagctgcgtggtgcagaagaaggagaggggcacctacgaggtgaagcacctggccctggtgaagctgagcatcaagg |
| | | ccgacttcagcacccctaacatcaccgagagcggcaaccctagcgccgacaccaagaggatcacctgcttcgctagcgg |
| | | cggcttccctaagcctaggttcagctggctggagaacggaagggagctgcctggcataaacacgaccatatctcaagac |
| | | cctgagagcgagctgtacaccatcagctctcagctggacttcaacaccacccgcaatcacaccatcaagtgcctgatca |
| | | agtacggcgacgcccacgtgagcgaggacttcacctgggagaagcctcctgaggaccctcctgacagcaagaac |
| Human CD80 Protein | 159 | VIHVTKEVKEVATLSCGHNVSVEELAQTRIYWQKEKKMVLTMMSGDMNIWPEYKNRTIFDITNNLSIVILALRPSDEGT |
| Sequence | | YECVVLKYEKDAFKREHLAEVTLSVKADFPTPSISDFEIPTSNIRRIICSTSGGFPEPHLSWLENGEELNAINTTVSQD |
| | | PETELYAVSSKLDFNMTTNHSFMCLIKYGHLRVNQTFNWNTTKQEHFPDN |
| Human CD80 DNA | 160 | gttatccacgtgaccaaggaagtgaaagaagtggcaacgctgtcctgtggtcacaatgtttctgttgaagagctggcac |
| Sequence | | aaactcgcatctactggcaaaaggagaagaaaatggtgctgactatgatgtctggggacatgaatatatggcccgagta |
| | | caagaaccggaccatctttgatatcactaataacctctccattgtgatcctggctctgcgcccatctgacgagggcaca |
| | | tacgagtgtgttgttctgaagtatgaaaaagacgctttcaagcgggaacacctggctgaagtgacgttatcagtcaaag |
| | | ctgacttccctacacctagtatatctgactttgaaattccaacttctaatattagaaggataatttgctcaacctctgg |
| | | aggttttccagagcctcacctctcctggttggaaaatggagaagaattaaatgccatcaacacaacagtttcccaagat |
| | | cctgaaactgagctctatgctgttagcagcaaactggatttcaatatgacaaccaaccacagcttcatgtgtctcatca |
| | | agtatggacatttaagagtgaatcagaccttcaactggaatacaaccaagcaagagcattttcctgataac |
| Murine CD86 Protein | 161 | MDPRCTMGLAILIFVTVLLISDAVSVETQAYFNGTAYLPCPFTKAQNISLSELVVFWQDQQKLVLYEHYLGT |
| Sequence | | EKLDSVNAKYLGRTSFDRNNWTLRLHNVQIKDMGSYDCFIQKKPPTGSIILQQTLTELSVIANFSEPEIKLA |
| | | QNVTGNSGINLTCTSKQGHPKPKKMYFLITNSTNEYGDNMQISQDNVTELFSISNSLSLSFPDGVWHMTVVC |
| | | VLETESMKISSKPLNFTQEFPSPQTYWK |
| Murine CD86 DNA | 162 | atggatccgcgctgcaccatgggcctggcgattctgatttttgtgaccgtgctgctgattagcgatgcggtgagcgtgg |
| Sequence | | aaacccaggcgtattttaacggcaccgcgtatctgccgtgcccgtttaccaaagcgcagaacattagcctgagcgaact |
| | | ggtggtgttttggcaggatcagcagaaactggtgctgtatgaacattatctgggcaccgaaaaactggatagcgtgaac |
| | | gcgaaatatctgggccgcaccagctttgatcgcaacaactggaccctgcgcctgcataacgtgcagattaaagatatgg |
| | | gcagctatgattgctttattcagaaaaaaccgccgaccggcagcattattctgcagcagaccctgaccgaactgagcgt |
| | | gattgcgaactttagcgaaccggaaattaaactggcgcagaacgtgaccggcaacagcggcattaacctgacctgcacc |
| | | agcaaacagggccatccgaaaccgaaaaaaatgtattttctgattaccaacagcaccaacgaatatggcgataacatgc |
| | | agattagccaggataacgtgaccgaactgtttagcattagcaacagcctgagcctgagctttccggatggcgtgtggca |
| | | tatgaccgtggtgtgcgtgctggaaaccgaaagcatgaaaattagcagcaaaccgctgaactttacccaggaatttccg |
| | | agcccgcagacctattggaaag |
| Murine IL-18 Protein | 163 | NFGRLHCTTAVIRNINDQVLFVDKRQPVFEDMTDIDQSASEPQTRLIIYMYKDSEVRGLAVTLSVKDSKMSTLSCKNKI |
| Sequence | | ISFEEMDPPENIDDIQSDLIFFQKRVPGHNKMEFESSLYEGHFLACQKEDDAFKLILKKKDENGDKSVMFTLTNLHQS |
| Murine IL-18 DNA Sequence | 164 | atggctgccatgtcagaagactcttgcgtcaacttcaaggaaatgatgtttattgacaacacgctttactttatacctg |
| | | aagaaaatggagacctggaatcagacaactttggccgacttcactgtacaaccgcagtaatacggaatataaatgacca |
| | | agttctcttcgttgacaaaagacagcctgtgttcgaggatatgactgatattgatcaaagtgccagtgaaccccagacc |
| | | agactgataatatacatgtacaaagacagtgaagtaagaggactggctgtgaccctctctgtgaaggatagtaaaatgt |
| | | ctaccctctcctgtaagaacaagatcatttcctttgaggaaatggatccacctgaaaatattgatgatatacaaagtga |
| | | tctcatattctttcagaaacgtgttccaggacacaacaagatggagtttgaatcttcactgtatgaaggacactttctt |
| | | gcttgccaaaaggaagatgatgctttcaaactcattctgaaaaaaaaggatgaaaatggggataaatctgtaatgttca |
| | | ctctcactaacttacatcaaagttag |
| Secreted Human IL-18 | 165 | YFGKLESKLSVIRNLNDQVLFIDQGNRPLFEDMTDSDCRDNAPRTIFIISMYKDSQPRGMAVTISVKCEKISTLSCENK |
| Protein Sequence | | IISFKEMNPPDNIKDTKSDIIFFQRSVPGHDNKMQFESSSYEGYFLACEKERDLFKLILKKEDELGDRSIMFTVQNED |
| Secreted Human IL-18 DNA | 166 | aactttggccgacttcactgtacaaccgcagtaatacggaatataaatgaccaagttctcttcgttgacaaaagacagc |
| Sequence | | ctgtgttcgaggatatgactgatattgatcaaagtgccagtgaaccccagaccagactgataatatacatgtacaaaga |
| | | cagtgaagtaagaggactggctgtgaccctctctgtgaaggatagtaaaatgtctaccctctcctgtaagaacaagatc |
| | | atttcctttgaggaaatggatccacctgaaaatattgatgatatacaaagtgatctcatattctttcagaaacgtgttc |
| | | caggacacaacaagatggagtttgaatcttcactgtatgaaggacactttcttgcttgccaaaaggaagatgatgcttt |
| | | caaactcattctgaaaaaaaaggatgaaaatggggataaatctgtaatgttcactctcactaacttacatcaaagttag |
| Murine IL-15 Protein | 167 | NWIDVRYDLEKIESLIQSIHIDTTLYTDSDFHPSCKVTAMNCFLLELQVILHEYSNMTLNETVRNVLYLANSTLSSNKN |
| Sequence | | VAESGCKECEELEEKTFTEFLQSFIRIVQMFINTS |
| Murine IL-15 DNA Sequence | 168 | aactggatagatgtaagatatgacctggagaaaattgaaagccttattcaatctattcatattgacaccactttataca |
| | | ctgacagtgactttcatcccagttgcaaagttactgcaatgaactgctttctcctggaattgcaggttattttacatga |
| | | gtacagtaacatgactcttaatgaaacagtaagaaacgtgctctaccttgcaaacagcactctgtcttctaacaagaat |
| | | gtagcagaatctggctgcaaggaatgtgaggagctggaggagaaaaccttcacagagtttttgcaaagctttatacgca |
| | | ttgtccaaatgttcatcaacacgtcc |
| Human IL-15 Protein | 169 | NWVNVISDLKKIEDLIQSMHIDATLYTESDVHPSCKVTAMKCFLLELQVISLESGDASIHDTVENLIILANNSLSSNGN |
| Sequence | | VTESGCKECEELEEKNIKEFLQSFVHIVQMFINTS |
| Human IL-15 DNA | 170 | aactgggtgaatgtaataagtgatttgaaaaaaattgaagatcttattcaatctatgcatattgatgctactttatata |
| Sequence | | cggaaagtgatgttcaccccagttgcaaagtaacagcaatgaagtgctttctcttggagttacaagttatttcacttga |
| | | gtccggagatgcaagtattcatgatacagtagaaaatctgatcatcctagcaaacaacagtttgtcttctaatgggaat |
| | | gtaacagaatctggatgcaaagaatgtgaggaactggaggaaaaaaatattaaagaatttttgcagagttttgtacata |
| | | ttgtccaaatgttcatcaacacttct |
| Murine IL-7 Protein | 171 | ECHIKDKEGKAYESVLMISIDELDKMTGTDSNCPNNEPNFFRKHVCDDTKEAAFLNRAARKLKQFLKMNISEEFNVHLL |
| Sequence | | TVSQGTQTLVNCTSKEEKNVKEQKKNDACFLKRLLREIKTCWNKILKGSI |
| Murine IL-7 DNA Sequence | 172 | gagtgccacattaaagacaaagaaggtaaagcatatgagagtgtactgatgatcagcatcgatgaattggacaaaatga |
| | | caggaactgatagtaattgcccgaataatgaaccaaacttttttagaaaacatgtatgtgatgatacaaaggaagctgc |
| | | ttttctaaatcgtgctgctcgcaagttgaagcaatttcttaaaatgaatatcagtgaagaattcaatgtccacttacta |
| | | acagtatcacaaggcacacaaacactggtgaactgcacaagtaaggaagaaaaaaacgtaaaggaacagaaaaagaatg |
| | | atgcatgtttcctaaagagactactgagagaaaaaaaacttgttggaataaaattttgaagggcagtatataa |
| Human IL-7 Protein | 173 | DCDIEGKDGKQYESVLMVSIDQLLDSMKEIGSNCLNNEFNFFKRHICDANKEGMFLFRAARKLRQFLKMNSTGDFDLHL |
| Sequence | | LKVSEGTTILLNCTGQVKGRKPAALGEAQPTKSLEENKSLKEQKKLNDLCFLKRLLQEIKTCWNKILMGTKEH |
| Human IL-7 DNA Sequence | 174 | gattgtgatattgaaggtaaagatggcaaacaatatgagagtgttctaatggtcagcatcgatcaattattggacagca |
| | | tgaaagaaattggtagcaattgcctgaataatgaatttaacttttttaaaagacatatctgtgatgctaataaggaagg |
| | | tatgtttttattccgtgctgctcgcaagttgaggcaatttcttaaaatgaatagcactggtgattttgatctccactta |
| | | ttaaaagtttcagaaggcacaacaatactgttgaactgcactggccaggttaaaggaagaaaaccagctgccctgggtg |
| | | aagcccaaccaacaaagagtttggaagaaaataaatctttaaaggaacagaaaaaactgaatgacttgtgtttcctaaa |
| | | gagactattacaagagataaaaacttgttggaataaaattttgatgggcactaaagaacactga |
| Murine IL-33 Protein | 175 | AASVDTLSIQGTSLLTQSPASLSTYNDQSVSFVLENGCYVINVDDSGKDQEQDQVLLRYYESPCPASQSGDGVDGKKLM |
| Sequence | | VNMSPIKDTDIWLHANDKDYSVELQRGDVSPPEQAFFVLHKKSSDFVSFECKNLPGTYIGVKDNQLALVEEKDESCNNI |
| | | MFKLSKI |
| Murine IL-33 DNA Sequence | 176 | gctgcgtctgttgacacattgagcatccaaggaacttcacttttaacacagtctcctgcctccctgagtacatacaatg |
| | | accaatctgttagttttgttttggagaatggatgttatgtgatcaatgttgacgactctggaaaagaccaagagcaaga |
| | | ccaggtgctactacgctactatgagtctccctgtcctgcaagtcaatcaggcgacggtgtggatgggaagaagctgatg |
| | | gtgaacatgagttccatcaaagacacagacatctggctgcatgccaacgacaaggactactccgtggagcttcaaaggg |
| | | gtgacgtctcgcctccggaacaggccttcttcgtccttcacaaaaagtcctcggactttgtttcatttgaatgcaagaa |
| | | tcttcctggcacttacataggagtgaaggacaaccagctggctctagtggaggaaaaagatgagagctgcaacaatatt |
| | | atgtttaagctctcgaaaatctaa |
| Human IL-33 Protein | 177 | AFGISGVQKYTRALHDSSITGISPITEYLASLSTYNDQSITFALEDESYEIYVEDLKKDEKKDKVLLSYYESQHPSNES |
| Sequence | | GDGVDGKMLMVTLSPTKDFWLHANNKEHSVELHKCEKPLPDQAFFVLHNMHSNCVSFECKTDPGVFIGVKDNHLALIKV |
| | | DSSENLCTENILFKLSET |
| Human IL-33 DNA | 178 | gcctttggtatatcaggggtccagaaatatactagagcacttcatgattcaagtatcacaggaatttcacctattacag |
| Sequence | | agtatcttgcttctctaagcacatacaatgatcaatccattacttttgctttggaggatgaaagttatgagatatatgt |
| | | tgaagacttgaaaaaagatgaaaagaaagataaggtgttactgagttactatgagtctcaacacccctcaaatgaatca |
| | | ggtgacggtgttgatggtaagatgttaatggtaaccctgagtcctacaaaagacttctggttgcatgccaacaacaagg |
| | | aacactctgtggagctccataagtgtgaaaaaccactgccagaccaggccttctttgtccttcataatatgcactccaa |
| | | ctgtgtttcatttgaatgcaagactgatcctggagtgtttataggtgtaaaggataatcatcttgctctgattaaagta |
| | | gactcttctgagaatttgtgtactgaaaatatcttgtttaagctctctgaaact |
| Murine IL-21 Protein | 179 | HKSSPQGPDRLLIRLRHLIDIVEQLKIYENDLDPELLSAPQDVKGHCEHAAFACFQKAKLKPSNPGNNKTFIIDLVAQL |
| Sequence | | RRRLPARRGGKKQKHIAKCPSCDSYEKRTPKEFLERLKWLLQKMIHQHLS |
| Murine IL-21 DNA Sequence | 180 | cataaatcaagcccccaagggccagatcgcctcctgattagacttcgtcaccttattgacattgttgaacagctgaaaa |
| | | tctatgaaaatgacttggatcctgaacttctatcagctccacaagatgtaaaggggcactgtgagcatgcagcttttgc |
| | | ctgttttcagaaggccaaactcaagccatcaaaccctggaaacaataagacattcatcattgacctcgtggcccagctc |
| | | aggaggaggctgcctgccaggaggggaggaaagaaacagaagcacatagctaaatgcccttcctgtgattcgtatgaga |
| | | aaaggacacccaaagaattcctagaaagactaaaatggctccttcaaaagatgattcatcagcatctctcc |
| Human IL-21 Protein | 181 | HKSSSQGQDRHMIRMRQLIDIVDQLKNYVNDLVPEFLPAPEDVETNCEWSAFSCFQKAQLKSANTGNNERIINVSIKKL |
| Sequence | | KRKPPSTNAGRRQKHRLTCPSCDSYEKKPPKEFLERFKSLLQKMIHQHLSSRTHGSEDS |
| Human IL-21 DNA | 182 | cacaaatcaagctcccaaggtcaagatcgccacatgattagaatgcgtcaacttatagatattgttgatcagctgaaaa |
| Sequence | | attatgtgaatgacttggtccctgaatttctgccagctccagaagatgtagagacaaactgtgagtggtcagctttttc |
| | | ctgttttcagaaggcccaactaaagtcagcaaatacaggaaacaatgaaaggataatcaatgtatcaattaaaaagctg |
| | | aagaggaaaccaccttccacaaatgcagggagaagacagaaacacagactaacatgcccttcatgtgattcttatgaga |
| | | aaaaaccacccaaagaattcctagaaagattcaaatcacttctccaaaagatgattcatcagcatctgtcctctagaac |
| | | acacggaagtgaagattcc |
| Murine IL-23a p19-P2A-IL- | 183 | MLDCRAVIMLWLLPWVTQGLAVPRSSSPDWAQCQQLSRNLCMLAWNAHAPAGHMNLLREEEDEETKNNVPRIQCEDGCD |
| 12 p40 Protein Sequence | | PQGLKDNSQFCLQRIRQGLAFYKHLLDSDIFKGEPALLPDSPMEQLHTSLLGLSQLLQPEDHPRETQQMPSLSSSQQWQ |
| | | RPLLRSKILRSLQAFLAIAARVFAHGAATLTEPLVPTAATNFSLLKQAGDVEENPGPCPQKLTISWFAIVLLVSPLMAM |
| | | WELEKDVYVVEVDWTPDAPGETVNLTCDTPEEDDITWTSDQRHGVIGSGKTLTITVKEFLDAGQYTCHKGGETLSHSHL |
| | | LLHKKENGIWSTEILKNFKNKTFLKCEAPNYSGRFTCSWLVQRNMDLKFNIKSSSSSPDSRAVTCGTASLSAEKVTLDQ |
| | | RDYEKYSVSCQEDVTCPTAEETLPIELALEARQQNKYENYSTSFFIRDIIKPDPPKNLQMKPLKNSQVEVSWEYPDSWS |
| | | TPHSYFSLKFFVRIQRKKEKMKETEEGCNQKGALLVEKTSTEVQCKGGNVCVQAQDRYYNSSCSKWACVPCRVRS |
| Murine IL-23a p19-P2A-IL- | 184 | atgctggattgcagagcagtaataatgctatggctgttgccctgggtcactcagggcctggctgtgcctaggagtagca |
| 12 p40 DNA Sequence | | gtcctgactgggctcagtgccagcagctctctcggaatctctgcatgctagcctggaacgcacatgcaccagcgggaca |
| | | tatgaatctactaagagaagaagaggatgaagagactaaaaataatgtgccccgtatccagtgtgaagatggttgtgac |
| | | ccacaaggactcaaggacaacagccagttctgcttgcaaaggatccgccaaggtctggctttttataagcacctgcttg |
| | | actctgacatcttcaaaggggagcctgctctactccctgatagccccatggagcaacttcacacctccctactaggact |
| | | cagccaactcctccagccagaggatcacccccgggagacccaacagatgcccagcctgagttctagtcagcagtggcag |
| | | cgcccccttctccgttccaagatccttcgaagcctccaggcctttttggccatagctgcccgggtctttgcccacggag |
| | | cagcaactctgactgagcccttagtgccaacagctgccaccaacttttcattgctcaagcaggcgggcgatgtggagga |
| | | aaaccctggccccggatcctgtcctcagaagctaaccatctcctggtttgccatcgttttgctggtgtctccactcatg |
| | | gccatgtgggagctggagaaagacgtttatgttgtagaggtggactggactcccgatgcccctggagaaacagtgaacc |
| | | tcacctgtgacacgcctgaagaagatgacatcacctggacctcagaccagagacatggagtcataggctctggaaagac |
| | | cctgaccatcactgtcaaagagtttctagatgctggccagtacacctgccacaaaggaggcgagactctgagccactca |
| | | catctgctgctccacaagaaggaaaatggaatttggtccactgaaattttaaaaaatttcaaaaacaagactttcctga |
| | | agtgtgaagcaccaaattactccggacggttcacgtgctcatggctggtgcaaagaaacatggacttgaagttcaacat |
| | | caagagcagtagcagttcccctgactctcgggcagtgacatgtggaacggcgtctctgtctgcagagaaggtcacactg |
| | | gaccaaagggactatgagaagtattcagtgtcctgccaggaggatgtcacctgcccaactgccgaggagaccctgccca |
| | | ttgaactggcgttggaagcacggcagcagaataaatatgagaactacagcaccagcttcttcatcagggacatcatcaa |
| | | accagacccgcccaagaacttgcagatgaagcctttgaagaactcacaggtggaggtcagctgggagtaccctgactcc |
| | | tggagcactccccattcctacttctccctcaagttctttgttcgaatccagcgcaagaaagaaaagatgaaggagacag |
| | | aggaggggtgtaaccagaaaggtgcgctcctcgtagagaagacatctaccgaagtccaatgcaaaggcgggaatgtctg |
| | | cgtgcaagctcaggatcgctattacaattcctcgtgcagcaagtgggcatgtgttccctgcagggtccgatcctag |
| Murine IL-23a p19 Protein | 185 | MLDCRAVIMLWLLPWVTQGLAVPRSSSPDWAQCQQLSRNLCMLAWNAHAPAGHMNLLREEEDEETKNNVPRIQCEDGCD |
| Sequence | | PQGLKDNSQFCLQRIRQGLAFYKHLLDSDIFKGEPALLPDSPMEQLHTSLLGLSQLLQPEDHPRETQQMPSLSSSQQWQ |
| | | RPLLRSKILRSLQAFLAIAARVFAHGAATLTEPLVPTA |
| Murine IL-23a p19 DNA | 186 | gccaccatgctggggagcagagctgtaatgctgctgttgctgctgccctggacagctcagggcagagctgtgcctgggg |
| Sequence | | gcagcagccctgcctggactcagtgccagcagctttcacagaagctctgcacactggcctggagtgcacatccactagt |
| | | gggacacatggatctaagagaagagggagatgaagagactacaaatgatgttccccatatccagtgtggagatggctgt |
| | | gacccccaaggactcagggacaacagtcagttctgcttgcaaaggatccaccagggtctgattttttatgagaagctgc |
| | | taggatcggatattttcacaggggagccttctctgctccctgatagccctgtgggccagcttcatgcctccctactggg |
| | | cctcagccaactcctgcagcctgagggtcaccactgggagactcagcagattccaagcctcagtcccagccagccatgg |
| | | cagcgtctccttctccgcttcaaaatccttcgcagcctccaggcctttgtggctgtagccgcccgggtctttgcccatg |
| | | gagcagcaaccctgagtccc |
| Murine IL-12 p40 Protein | 187 | CPQKLTISWFAIVLLVSPLMAMWELEKDVYVVEVDWTPDAPGETVNLTCDTPEEDDITWTSDQRHGVIGSGKTLTITVK |
| Sequence | | EFLDAGQYTCHKGGETLSHSHLLLHKKENGIWSTEILKNFKNKTFLKCEAPNYSGRFTCSWLVQRNMDLKFNIKSSSSS |
| | | PDSRAVTCGTASLSAEKVTLDQRDYEKYSVSCQEDVTCPTAEETLPIELALEARQQNKYENYSTSFFIRDIIKPDPPKN |
| | | LQMKPLKNSQVEVSWEYPDSWSTPHSYFSLKFFVRIQRKKEKMKETEEGCNQKGALLVEKTSTEVQCKGGNVCVQAQDR |
| | | YYNSSCSKWACVPCRVRS |
| Murine IL-12 p40 DNA | 188 | ggatccatgtgtcaccagcagttggtcatctcttggttttccctggtttttctggcatctcccctcgtggccatatggg |
| Sequence | | aactgaagaaagatgtttatgtcgtagaattggattggtatccggatgcccctggagaaatggtggtcctcacctgtga |
| | | cacccctgaagaagatggtatcacctggaccttggaccagagcagtgaggtcttaggctctggcaaaaccctgaccatc |
| | | caagtcaaagagtttggagatgctggccagtacacctgtcacaaaggaggcgaggttctaagccattcgctcctgctgc |
| | | ttcacaaaaaggaagatggaatttggtccactgatattttaaaggaccagaaagaacccaaaaataagacctttctaag |
| | | atgcgaggccaagaattattctggacgtttcacctgctggtggctgacgacaatcagtactgatttgacattcagtgtc |
| | | aaaagcagcagaggctcttctgacccccaaggggtgacgtgcggagctgctacactctctgcagagagagtcagagggg |
| | | acaacaaggagtatgagtactcagtggagtgccaggaggacagtgcctgcccagctgctgaggagagtctgcccattga |
| | | ggtcatggtggatgccgttcacaagctcaagtatgaaaactacaccagcagcttcttcatcagggacatcatcaaacct |
| | | gacccacccaagaacttgcagctgaagccattaaagaattctcggcaggtggaggtcagctgggagtaccctgacacct |
| | | ggagtactccacattcctacttctccctgacattctgcgttcaggtccagggcaagagcaagagagaaaagaaagatag |
| | | agtcttcacggacaagacctcagccacggtcatctgccgcaaaaatgccagcattagcgtgcgggcccaggaccgctac |
| | | tatagctcatcttggagcgaatgggcatctgtgccctgcagttag |
| Human IL-23a p19-P2A-IL- | 189 | MLGSRAVMLLLLLPWTAQGRAVPGGSSPAWTQCQQLSQKLCTLAWSAHPLVGHMDLREEGDEETTNDVPHIQCGDGCDP |
| 12 p40 Protein Sequence | | QGLRDNSQFCLQRIHQGLIFYEKLLGSDIFTGEPSLLPDSPVGQLHASLLGLSQLLQPEGHHWETQQIPSLSPSQPWQR |
| | | LLLRFKILRSLQAFVAVAARVFAHGAATLSPATNFSLLKQAGDVEENPGPMCHQQLVISWFSLVFLASPLVAIWELKKD |
| | | VYVVELDWYPDAPGEMVVLTCDTPEEDGITWTLDQSSEVLGSGKTLTIQVKEFGDAGQYTCHKGGEVLSHSLLLLHKKE |
| | | DGIWSTDILKDQKEPKNKTFLRCEAKNYSGRFTCWWLTTISTDLTFSVKSSRGSSDPQGVTCGAATLSAERVRGDNKEY |
| | | EYSVECQEDSACPAAEESLPIEVMVDAVHKLKYENYTSSFFIRDIIKPDPPKNLQLKPLKNSRQVEVSWEYPDTWSTPH |
| | | SYFSLTFCVQVQGKSKREKKDRVFTDKTSATVICRKNASISVRAQDRYYSSSWSEWASVPCS |
| Human IL-23a p19-P2A-IL- | 190 | gccaccatgctggggagcagagctgtaatgctgctgttgctgctgccctggacagctcagggcagagctgtgcctgggg |
| 12 p40 DNA Sequence | | gcagcagccctgcctggactcagtgccagcagctttcacagaagctctgcacactggcctggagtgcacatccactagt |
| | | gggacacatggatctaagagaagagggagatgaagagactacaaatgatgttccccatatccagtgtggagatggctgt |
| | | gacccccaaggactcagggacaacagtcagttctgcttgcaaaggatccaccagggtctgattttttatgagaagctgc |
| | | taggatcggatattttcacaggggagccttctctgctccctgatagccctgtgggccagcttcatgcctccctactggg |
| | | cctcagccaactcctgcagcctgagggtcaccactgggagactcagcagattccaagcctcagtcccagccagccatgg |
| | | cagcgtctccttctccgcttcaaaatccttcgcagcctccaggcctttgtggctgtagccgcccgggtctttgcccatg |
| | | gagcagcaaccctgagtcccgccaccaacttttcattgctcaagcaggcgggcgatgtggaggaaaaccctggccccgg |
| | | atccatgtgtcaccagcagttggtcatctcttggttttccctggtttttctggcatctcccctcgtggccatatgggaa |
| | | ctgaagaaagatgtttatgtcgtagaattggattggtatccggatgcccctggagaaatggtggtcctcacctgtgaca |
| | | cccctgaagaagatggtatcacctggaccttggaccagagcagtgaggtcttaggctctggcaaaaccctgaccatcca |
| | | agtcaaagagtttggagatgctggccagtacacctgtcacaaaggaggcgaggttctaagccattcgctcctgctgctt |
| | | cacaaaaaggaagatggaatttggtccactgatattttaaaggaccagaaagaacccaaaaataagacctttctaagat |
| | | gcgaggccaagaattattctggacgtttcacctgctggtggctgacgacaatcagtactgatttgacattcagtgtcaa |
| | | aagcagcagaggctcttctgacccccaaggggtgacgtgcggagctgctacactctctgcagagagagtcagaggggac |
| | | aacaaggagtatgagtactcagtggagtgccaggaggacagtgcctgcccagctgctgaggagagtctgcccattgagg |
| | | tcatggtggatgccgttcacaagctcaagtatgaaaactacaccagcagcttcttcatcagggacatcatcaaacctga |
| | | cccacccaagaacttgcagctgaagccattaaagaattctcggcaggtggaggtcagctgggagtaccctgacacctgg |
| | | agtactccacattcctacttctccctgacattctgcgttcaggtccagggcaagagcaagagagaaaagaaagatagag |
| | | tcttcacggacaagacctcagccacggtcatctgccgcaaaaatgccagcattagcgtgcgggcccaggaccgctacta |
| | | tagctcatcttggagcgaatgggcatctgtgccctgcagttag |
| Human IL-23a p19 Protein | 191 | MLGSRAVMLLLLLPWTAQGRAVPGGSSPAWTQCQQLSQKLCTLAWSAHPLVGHMDLREEGDEETTNDVPHIQCGDGCDP |
| Sequence | | QGLRDNSQFCLQRIHQGLIFYEKLLGSDIFTGEPSLLPDSPVGQLHASLLGLSQLLQPEGHHWETQQIPSLSPSQPWQR |
| | | LLLRFKILRSLQAFVAVAARVFAHGAATLSP |
| Human IL-23a p19 DNA | 192 | gccaccatgctggggagcagagctgtaatgctgctgttgctgctgccctggacagctcagggcagagctgtgcctgggg |
| Sequence | | gcagcagccctgcctggactcagtgccagcagctttcacagaagctctgcacactggcctggagtgcacatccactagt |
| | | gggacacatggatctaagagaagagggagatgaagagactacaaatgatgttccccatatccagtgtggagatggctgt |
| | | gacccccaaggactcagggacaacagtcagttctgcttgcaaaggatccaccagggtctgattttttatgagaagctgc |
| | | taggatcggatattttcacaggggagccttctctgctccctgatagccctgtgggccagcttcatgcctccctactggg |
| | | cctcagccaactcctgcagcctgagggtcaccactgggagactcagcagattccaagcctcagtcccagccagccatgg |
| | | cagcgtctccttctccgcttcaaaatccttcgcagcctccaggcctttgtggctgtagccgcccgggtctttgcccatg |
| | | gagcagcaaccctgagtccc |
| Human IL-12 p40 Protein | 193 | MCHQQLVISWFSLVFLASPLVAIWELKKDVYVVELDWYPDAPGEMVVLTCDTPEEDGITWTLDQSSEVLGSGKTLTIQV |
| Sequence | | KEFGDAGQYTCHKGGEVLSHSLLLLHKKEDGIWSTDILKDQKEPKNKTFLRCEAKNYSGRFTCWWLTTISTDLTFSVKS |
| | | SRGSSDPQGVTCGAATLSAERVRGDNKEYEYSVECQEDSACPAAEESLPIEVMVDAVHKLKYENYTSSFFIRDIIKPDP |
| | | PKNLQLKPLKNSRQVEVSWEYPDTWSTPHSYFSLTFCVQVQGKSKREKKDRVFTDKTSATVICRKNASISVRAQDRYYS |
| | | SSWSEWASVPCS |
| Human IL-12 p40 DNA | 194 | ggatccatgtgtcaccagcagttggtcatctcttggttttccctggtttttctggcatctcccctcgtggccatatggg |
| Sequence | | aactgaagaaagatgtttatgtcgtagaattggattggtatccggatgcccctggagaaatggtggtcctcacctgtga |
| | | cacccctgaagaagatggtatcacctggaccttggaccagagcagtgaggtcttaggctctggcaaaaccctgaccatc |
| | | caagtcaaagagtttggagatgctggccagtacacctgtcacaaaggaggcgaggttctaagccattcgctcctgctgc |
| | | ttcacaaaaaggaagatggaatttggtccactgatattttaaaggaccagaaagaacccaaaaataagacctttctaag |
| | | atgcgaggccaagaattattctggacgtttcacctgctggtggctgacgacaatcagtactgatttgacattcagtgtc |
| | | aaaagcagcagaggctcttctgacccccaaggggtgacgtgcggagctgctacactctctgcagagagagtcagagggg |
| | | acaacaaggagtatgagtactcagtggagtgccaggaggacagtgcctgcccagctgctgaggagagtctgcccattga |
| | | ggtcatggtggatgccgttcacaagctcaagtatgaaaactacaccagcagcttcttcatcagggacatcatcaaacct |
| | | gacccacccaagaacttgcagctgaagccattaaagaattctcggcaggtggaggtcagctgggagtaccctgacacct |
| | | ggagtactccacattcctacttctccctgacattctgcgttcaggtccagggcaagagcaagagagaaaagaaagatag |
| | | agtcttcacggacaagacctcagccacggtcatctgccgcaaaaatgccagcattagcgtgcgggcccaggaccgctac |
| | | tatagctcatcttggagcgaatgggcatctgtgccctgcagttag |
| HER2-LAMP Protein | 195 | MAPRSARRPLLLLLLLLLLGLMHCASAAMFMVKNGNGTACIMANFSAAFSVNYDTKSGPKNMTLDLPSDATVVLNRSSC |
| Sequence | | GKENTSDPSLVIAFGRGHTLTLNFTRNATRYSVQLMSFVYNLSDTHLFPNASSKEIKTVESITDIRADIDKKYRCVSGT |
| | | QVHMNNVTVTLHDATIQAYLSNSSFSRGETRCEQDLETQVCTGTDMKLRLPASPETHLDMLRHLYQGCQVVQGNLELTY |
| | | LPTNASLSFLQDIQEVQGYVLIAHNQVRQVPLQRLRIVRGTQLFEDNYALAVLDNGDPLNNTTPVTGASPGGLRELQLR |
| | | SLTEILKGGVLIQRNPQLCYQDTILWKDIFHKNNQLALTLIDTNRSRACHPCSPMCKGSRCWGESSEDCQSLTRTVCAG |
| | | GCARCKGPLPTDCCHEQCAAGCTGPKHSDCLACLHFNHSGICELHCPALVTYNTDTFESMPNPEGRYTFGASCVTACPY |
| | | NYLSTDVGSCTLVCPLHNQEVTAEDGTQRCEKCSKPCARVCYGLGMEHLREVRAVTSANIQEFAGCKKIFGSLAFLPES |
| | | FDGDPASNTAPLQPEQLQVFETLEEITGYLYISAWPDSLPDLSVFQNLQVIRGRILHNGAYSLTLQGLGISWLGLRSLR |
| | | ELGSGLALIHHNTHLCFVHTVPWDQLFRNPHQALLHTANRPEDECVGEGLACHQLCARGHCWGPGPTQCVNCSQFLRGQ |
| | | ECVEECRVLQGLPREYVNARHCLPCHPECQPQNGSVTCFGPEADQCVACAHYKDPPFCVARCPSGVKPDLSYMPIWKFP |
| | | DEEGACQPCPINCTHEFTCLLASMGLQLNLTYERKDNTTVTRLLNINPNKTSASGSCGAHLVTLELHSEGTTVLLFQFG |
| | | MNASSSRFFLQGIQLNTILPDARDPAFKAANGSLRALQATVGNSYKCNAEEHVRVTKAFSVNIFKVWVQAFKVEGGQFG |
| | | SVEECLLDENSM |
| mSPD + sCD40L protein | 196 | MLPFLSMLVLLVQPLGNLGAEMKSLSQRSVPNTCTLVMCSPTENGLPGRDGRDGREGPRGEKGDPGLPGPMGLSGLQGP |
| sequence | | TGPVGPKGENGSAGEPGPKGERGLSGPPGLPGIPGPAGKEGPSGKQGNIGPQGKPGPKGEAGPKGEVGAPGMQGSTGAK |
| | | GSTGPKGERGAPGVQGAPGNAGAAGPAGPAGPQGAPGSRGPPGLKGDRGVPGDRGIKGESGLPDSAALRQQMEALKGKL |
| | | QRLEVAFSHYQKAALFPDGHRRLDKVEEEVNLHEDFVFIKKLKRCNKGEGSLSLLNCEEMRRQFEDLVKDITLNKEEKK |
| | | ENSFEMQRGDEDPQIAAHVVSEANSNAASVLQWAKKGYYTMKSNLVMLENGKQLTVKREGLYYVYTQVTFCSNREPSSQ |
| | | RPFIVGLWLKPSSGSERILLKAANTHSSSQLCEQQSVHLGGVFELQAGASVFVNVTEASQVIHRVGFSSFGLLKL |
| HER2-LAMP-sCD40L; | 197 | atggtgaaaaatggcaacgggaccgcgtgcataatggccaacttctctgctgccttctcagtgaactacgacaccaaga |
| HER2 (Extracellular | | gtggccctaagaacatgacccttgacctgccatcagatgccacagtggtgctcaaccgcagctcctgtggaaaagagaa |
| Domain) +LAMP +EF- | | cacttctgaccccagtctcgtgattgcttttggaagaggacatacactcactctcaatttcacgagaaatgcaacacgt |
| 1alpha +SPD +sCD40L; | | tacagcgtccagctcatgagttttgtttataacttgtcagacacacaccttttccccaatgcgagctccaaagaaatca |
| DNA Sequence | | agactgtggaatctataactgacatcagggcagatatagataaaaaatacagatgtgttagtggcacccaggtccacat |
| | | gaacaacgtgaccgtaacgctccatgatgccaccatccaggcgtacctttccaacagcagcttcagccggggagagaca |
| | | cgctgtgaacaagacctcgagacacaagtctgcaccggcaccgacatgaagctgagactgcccgccagccccgaaaccc |
| | | atctggacatgctgcggcatctgtaccaaggctgtcaagtggtgcaaggcaatctggaactgacatatctgcctaccaa |
| | | cgcctctctgagctttctgcaagacatccaagaagtgcaaggctacgtcctcattgcccacaaccaagtccgacaagtg |
| | | ccactgcagcggctgagaatcgtgcggggcacccagctgttcgaggacaactatgctctggccgtgctggacaacggcg |
| | | accctctgaacaacaccacaccagtgactggcgcctctcccggcggactgagagaactgcagctgcgctctctgaccga |
| | | gattctgaagggcggcgtgctgatccagcggaaccctcagctgtgctaccaagacaccattctgtggaaggacatcttc |
| | | cacaagaacaaccagctggctctgaccctcatcgacaccaacagaagccgggcttgccacccttgcagccccatgtgca |
| | | agggcagcagatgttggggcgagagcagcgaggactgccagtctctgaccagaaccgtgtgtgccggcggatgcgccag |
| | | atgcaagggccctctgccaaccgattgctgccacgaacagtgcgccgctggctgtaccggccccaagcacagcgattgt |
| | | ctggcttgtctgcacttcaaccactccggcatctgcgagctgcactgcccagccctcgtgacatacaacaccgacacat |
| | | tcgagagcatgcccaaccccgagggcagatacacattcggcgccagctgtgtgaccgcttgcccctacaactatctgag |
| | | caccgacgtgggcagctgcaccctcgtgtgccctctgcacaatcaagaagtgaccgccgaggacggcacccagagatgc |
| | | gagaagtgctccaagccttgcgccagagtgtgctacggactgggcatggaacatctgcgggaagtgcgggccgtgacca |
| | | gcgccaatatccaagaatttgccggctgcaagaagattttcggcagtctggcctttctgcccgagagcttcgatggcga |
| | | ccccgcctctaacacagcccctctgcagccagagcagctccaagtgttcgagacactggaagagatcaccggctatctg |
| | | tacatcagcgcttggcccgactctctgcccgatctgagcgtgttccagaatctgcaagtcatcagaggccggattctgc |
| | | acaacggcgcctattctctgacactgcaaggactgggaatcagctggctgggactgcggagtctgagagagctgggcag |
| | | cggactggcactgatccaccacaacacccatctgtgcttcgtgcacaccgtgccttgggatcagctgttccggaatccc |
| | | caccaagctctgctgcacaccgccaacagacccgaggatgagtgtgtgggcgaggggctggcttgccatcagctctgtg |
| | | ccagaggacactgttggggacccggccctacccagtgcgtgaactgctcccagtttctgcggggccaagaatgcgtgga |
| | | agagtgcagagtgctccaaggactgccccgcgagtacgtgaacgccagacactgtctgccatgccaccccgagtgccag |
| | | cctcagaatggcagcgtgacatgcttcggccccgaggccgatcagtgtgtggcttgcgctcactacaaggaccctccct |
| | | tctgcgtggcccggtgtccttctggcgtgaaacccgatctgtcctacatgcctatctggaagttccccgacgaggaagg |
| | | cgcttgtcagccttgccccatcaactgcacccacgaattcacctgcctgctggccagcatggggctgcagctgaacctc |
| | | acctatgagaggaaggacaacacgacggtgacaaggcttctcaacatcaaccccaacaagacctcggccagcgggagct |
| | | gcggcgcccacctggtgactctggagctgcacagcgagggcaccaccgtcctgctcttccagttcgggatgaatgcaag |
| | | ttctagccggtttttcctacaaggaatccagttgaatacaattcttcctgacgccagagaccctgcctttaaagctgcc |
| | | aacggctccctgcgagcgctgcaggccacagtcggcaattcctacaagtgcaacgcggaggagcacgtccgtgtcacga |
| | | aggcgttttcagtcaatatattcaaagtgtgggtccaggctttcaaggtggaaggtggccagtttggctctgtggagga |
| | | gtgtctgctggacgagaacagcatgctgatccccatcgctgtgggtggtgccctggcggggctggtcctcatcgtcctc |
| | | atcgcctacctcgtcggcaggaagaggagtcacgcaggctaccagactatctagtaaagatctttttccctctgccaaa |
| | | aattatggggacatcatgaagccccttgagcatctgacttctggctaataaaggaaatttattttcattgcaatagtgt |
| | | gttggaattttttgtgtctctcactcggaaggacataagggcggccgcggtacccgtgaggctccggtgcccgtcagtg |
| | | ggcagagcgcacatcgcccacagtccccgagaagttggggggaggggtcggcaattgaaccggtgcctagagaaggtgg |
| | | cgcggggtaaactgggaaagtgatgtcgtgtactggctccgcctttttcccgagggtgggggagaaccgtatataagtg |
| | | cagtagtcgccgtgaacgttctttttcgcaacgggtttgccgccagaacacagtctagaggatccgccgccaccatgga |
| | | aaccgatacactgctgctgtgggtgctgttgctctgggttccaggatctacaggcgacatgctgccctttctctccatg |
| | | cttgtcttgcttgtacagcccctgggaaatctgggagcagaaatgaagagcctctcgcagagatcagtacccaacacct |
| | | gcaccctagtcatgtgtagcccaacagagaatggcctgcctggtcgtgatggacgggatgggagagaaggtccacgggg |
| | | tgagaagggtgatccaggtttgccaggacctatggggctctcagggttgcagggccctacaggtccagttggacccaaa |
| | | ggagagaatggctctgctggcgaacctggaccaaagggagaacgtggactaagtggacctccaggacttccaggtattc |
| | | ctggtccagctgggaaagaaggtccctctgggaagcaggggaacataggacctcaaggcaaaccaggtcctaaaggaga |
| | | ggctgggcccaaaggagaagtaggtgctcctggcatgcaaggatctacaggggcaaaaggctccacaggccccaaggga |
| | | gaaagaggtgcccctggtgtgcaaggagccccagggaatgctggagcagcaggacctgccggacctgccggtccacagg |
| | | gagctccaggttccagggggcccccaggactcaagggggacagaggtgttcctggagacagaggaatcaaaggtgaaag |
| | | cgggcttccagacagtgctgctctgaggcagcagatggaggccttaaaaggaaaactacagcgtctagaggttgccttc |
| | | tcccactatcagaaagctgcattgttccctgatggccatagaagattggataaggtcgaagaggaagtaaaccttcatg |
| | | aagattttgtattcataaaaaagctaaagagatgcaacaaaggagaaggatctttatccttgctgaactgtgaggagat |
| | | gagaaggcaatttgaagaccttgtcaaggatataacgttaaacaaagaagagaaaaaagaaaacagctttgaaatgcaa |
| | | agaggtgatgaggatcctcaaattgcagcacacgttgtaagcgaagccaacagtaatgcagcatccgttctacagtggg |
| | | ccaagaaaggatattataccatgaaaagcaacttggtaatgcttgaaaatgggaaacagctgacggttaaaagagaagg |
| | | actctattatgtctacactcaagtcaccttctgctctaatcgggagccttcgagtcaacgcccattcatcgtcggcctc |
| | | tggctgaagcccagcagtggatctgagagaatcttactcaaggcggcaaatacccacagttcctcccagctttgcgagc |
| | | agcagtctgttcacttgggcggagtgtttgaattacaagctggtgcttctgtgtttgtcaacgtgactgaagcaagcca |
| | | agtgatccacagagttggcttctcatcttttggcttactcaaactctgaacgcgtttcctgtgccttctagttgccagc |
| | | catctgttgtttgcccctcccccgtgccttccttgaccctggaaggtgccactcccactgtcctttcctaataaaatga |
| | | ggaaattgcatcgcattgtctgagtaggtgtcattctattctggggggtggggtggggcaggacagcaagggggaggat |
| | | tgggaagacaatagcaggcatgctggggatgcggtgggctctatggcccggg |
| LAMP Signal Sequence | 198 | MAPRSARRPLLLLLLLLLLGLMHCASAAMFMVKNGNGTACIMANFSAAFSVNYDTKSGPKNMTLDLPSDATVVLNRSSC |
| (residues 1-28) and Luminal | | GKENTSDPSLVIAFGRGHTLTLNFTRNATRYSVQLMSFVYNLSDTHLFPNASSKEIKTVESITDIRADIDKKYRCVSGT |
| Domain 1 | | QVHMNNVTVTLHDATIQAYLSNSSFSRGETRCEQDLE |
| LAMP Signal Sequence and | 199 | atggcgccccgcagcgcccggcgacccctgctgctgctactgctgttgctgctgctcggcctcatgcattgtgcgtcag |
| Luminal Domain 1 | | cagcaatgtttatggtgaaaaatggcaacgggaccgcgtgcataatggccaacttctctgctgccttctcagtgaacta |
| | | cgacaccaagagtggccctaagaacatgacccttgacctgccatcagatgccacagtggtgctcaaccgcagctcctgt |
| | | ggaaaagagaacacttctgaccccagtctcgtgattgcttttggaagaggacatacactcactctcaatttcacgagaa |
| | | atgcaacacgttacagcgtccagctcatgagttttgtttataacttgtcagacacacaccttttccccaatgcgagctc |
| | | caaagaaatcaagactgtggaatctataactgacatcagggcagatatagataaaaaatacagatgtgttagtggcacc |
| | | caggtccacatgaacaacgtgaccgtaacgctccatgatgccaccatccaggcgtacctttccaacagcagcttcagcc |
| | | ggggagagacacgctgtgaacaagacctcgag |
| HER2 (Extracellular | 200 | TQVCTGTDMKLRLPASPETHLDMLRHLYQGCQVVQGNLELTYLPTNASLSFLQDIQEVQGYVLIAHNQVRQVPLQRLRI |
| Domain) Protein Sequence | | VRGTQLFEDNYALAVLDNGDPLNNTTPVTGASPGGLRELQLRSLTEILKGGVLIQRNPQLCYQDTILWKDIFHKNNQLA |
| | | LTLIDTNRSRACHPCSPMCKGSRCWGESSEDCQSLTRTVCAGGCARCKGPLPTDCCHEQCAAGCTGPKHSDCLACLHFN |
| | | HSGICELHCPALVTYNTDTFESMPNPEGRYTFGASCVTACPYNYLSTDVGSCTLVCPLHNQEVTAEDGTQRCEKCSKPC |
| | | ARVCYGLGMEHLREVRAVTSANIQEFAGCKKIFGSLAFLPESFDGDPASNTAPLQPEQLQVFETLEEITGYLYISAWPD |
| | | SLPDLSVFQNLQVIRGRILHNGAYSLTLQGLGISWLGLRSLRELGSGLALIHHNTHLCFVHTVPWDQLFRNPHQALLHT |
| | | ANRPEDECVGEGLACHQLCARGHCWGPGPTQCVNCSQFLRGQECVEECRVLQGLPREYVNARHCLPCHPECQPQNGSVT |
| | | CFGPEADQCVACAHYKDPPFCVARCPSGVKPDLSYMPIWKFPDEEGACQPCPINCTHEF |
| HER2 (Extracellular | 201 | acccaggtgtgcaccggcaccgatatgaaactgcgcctgccggcgagcccggaaacccatctggatatgctgcgccatc |
| Domain) DNA Sequence | | tgtatcagggctgccaggtggtgcagggcaacctggaactgacctatctgccgaccaacgcgagcctgagctttctgca |
| | | ggatattcaggaagtgcagggctatgtgctgattgcgcataaccaggtgcgccaggtgccgctgcagcgcctgcgcatt |
| | | gtgcgcggcacccagctgtttgaagataactatgcgctggcggtgctggataacggcgatccgctgaacaacaccaccc |
| | | cggtgaccggcgcgagcccgggcggcctgcgcgaactgcagctgcgcagcctgaccgaaattctgaaaggcggcgtgct |
| | | gattcagcgcaacccgcagctgtgctatcaggataccattctgtggaaagatatttttcataaaaacaaccagctggcg |
| | | ctgaccctgattgataccaaccgcagccgcgcgtgccatccgtgcagcccgatgtgcaaaggcagccgctgctggggcg |
| | | aaagcagcgaagattgccagagcctgacccgcaccgtgtgcgcgggcggctgcgcgcgctgcaaaggcccgctgccgac |
| | | cgattgctgccatgaacagtgcgcggcgggctgcaccggcccgaaacatagcgattgcctggcgtgcctgcattttaac |
| | | catagcggcatttgcgaactgcattgcccggcgctggtgacctataacaccgatacctttgaaagcatgccgaacccgg |
| | | aaggccgctatacctttggcgcgagctgcgtgaccgcgtgcccgtataactatctgagcaccgatgtgggcagctgcac |
| | | cctggtgtgcccgctgcataaccaggaagtgaccgcggaagatggcacccagcgctgcgaaaaatgcagcaaaccgtgc |
| | | gcgcgcgtgtgctatggcctgggcatggaacatctgcgcgaagtgcgcgcggtgaccagcgcgaacattcaggaatttg |
| | | cgggctgcaaaaaaatttttggcagcctggcgtttctgccggaaagctttgatggcgatccggcgagcaacaccgcgcc |
| | | gctgcagccggaacagctgcaggtgtttgaaaccctggaagaaattaccggctatctgtatattagcgcgtggccggat |
| | | agcctgccggatctgagcgtgtttcagaacctgcaggtgattcgcggccgcattctgcataacggcgcgtatagcctga |
| | | ccctgcagggcctgggcattagctggctgggcctgcgcagcctgcgcgaactgggcagcggcctggcgctgattcatca |
| | | taacacccatctgtgctttgtgcataccgtgccgtgggatcagctgtttcgcaacccgcatcaggcgctgctgcatacc |
| | | gcgaaccgcccggaagatgaatgcgtgggcgaaggcctggcgtgccatcagctgtgcgcgcgcggccattgctggggcc |
| | | cgggcccgacccagtgcgtgaactgcagccagtttctgcgcggccaggaatgcgtggaagaatgccgcgtgctgcaggg |
| | | cctgccgcgcgaatatgtgaacgcgcgccattgcctgccgtgccatccggaatgccagccgcagaacggcagcgtgacc |
| | | tgctttggcccggaagcggatcagtgcgtggcgtgcgcgcattataaagatccgccgttttgcgtggcgcgctgcccga |
| | | gcggcgtgaaaccggatctgagctatatgccgatttggaaatttccggatgaagaaggcgcgtgccagccgtgcccgat |
| | | taactgcacccatgaattt |
| Luminal Domain 2 of LAMP | 202 | TCLLASMGLQLNLTYERKDNTTVTRLLNINPNKTSASGSCGAHLVTLELHSEGTTVLLFQFGMNASSSRFFLQGIQLNT |
| Protein Sequence | | ILPDARDPAFKAANGSLRALQATVGNSYKCNAEEHVRVTKAFSVNIFKVWVQAFKVEGGQFGSVEECLLDENSM |
| Luminal Domain 2 of LAMP | 203 | acctgcctgctggccagcatggggctgcagctgaacctcacctatgagaggaaggacaacacgacggtgacaaggcttc |
| DNA Sequence | | tcaacatcaaccccaacaagacctcggccagcgggagctgcggcgcccacctggtgactctggagctgcacagcgaggg |
| | | caccaccgtcctgctcttccagttcgggatgaatgcaagttctagccggtttttcctacaaggaatccagttgaataca |
| | | attcttcctgacgccagagaccctgcctttaaagctgccaacggctccctgcgagcgctgcaggccacagtcggcaatt |
| | | cctacaagtgcaacgcggaggagcacgtccgtgtcacgaaggcgttttcagtcaatatattcaaagtgtgggtccaggc |
| | | tttcaaggtggaaggtggccagtttggctctgtggaggagtgtctgctggacgagaacagcatg |
| sCD40L Protein Sequence | 204 | HRRLDKVEEEVNLHEDFVFIKKLKRCNKGEGSLSLLNCEEMRRQFEDLVKDITLNKEEKKENSFEMQRGDEDPQIAAHV |
| | | VSEANSNAASVLQWAKKGYYTMKSNLVMLENGKQLTVKREGLYYVYTQVTFCSNREPSSQRPFIVGLWLKPSSGSERIL |
| | | LKAANTHSSSQLCEQQSVHLGGVFELQAGASVFVNVTEASQVIHRVGFSSFGLLKL |
| sCD40L DNA Sequence | 205 | catcgccgcctggataaagtggaagaagaagtgaacctgcatgaagattttgtgtttattaaaaaactgaaacgctgca |
| | | acaaaggcgaaggcagcctgagcctgctgaactgcgaagaaatgcgccgccagtttgaagatctggtgaaagatattac |
| | | cctgaacaaagaagaaaaaaaagaaaacagctttgaaatgcagcgcggcgatgaagatccgcagattgcggcgcatgtg |
| | | gtgagcgaagcgaacagcaacgcggcgagcgtgctgcagtgggcgaaaaaaggctattataccatgaaaagcaacctgg |
| | | tgatgctggaaaacggcaaacagctgaccgtgaaacgcgaaggcctgtattatgtgtatacccaggtgaccttttgcag |
| | | caaccgcgaaccgagcagccagcgcccgtttattgtgggcctgtggctgaaaccgagcagcggcagcgaacgcattctg |
| | | ctgaaagcggcgaacacccatagcagcagccagctgtgcgaacagcagagcgtgcatctgggcggcgtgtttgaactgc |
| | | aggcgggcgcgagcgtgtttgtgaacgtgaccgaagcgagccaggtgattcatcgcgtgggctttagcagctttggcct |
| | | gctgaaactgtaa |
| | 206 | |
| SPD + mFLT3L protein | 207 | MLPFLSMLVLLVQPLGNLGAEMKSLSQRSVPNTCTLVMCSPTENGLPGRDGRDGREGPRGEKGDPGLPGPMGLSGLQGP |
| sequence | | TGPVGPKGENGSAGEPGPKGERGLSGPPGLPGIPGPAGKEGPSGKQGNIGPQGKPGPKGEAGPKGEVGAPGMQGSTGAK |
| | | GSTGPKGERGAPGVQGAPGNAGAAGPAGPAGPQGAPGSRGPPGLKGDRGVPGDRGIKGESGLPDSAALRQQMEALKGKL |
| | | QRLEVAFSHYQKAALFPDGPCLRGTPDCYFSHSPISSNFKVKFRELTDHLLKDYPVTVAVNLQDEKHCKALWSLFLAQR |
| | | WIEQLKTVAGSKMQTLLEDVNTEIHFVTSCTFQPLPECLRFVQTNISHLLKDTCTQLLALKPCIGKACQNFSRCLEVQC |
| | | QPDSSTLLPPRSPIALEATELPEPRPRQ |
| HER2-LAMP-mFLT3L; | 208 | atggcgccccgcagcgcccggcgacccctgctgctgctactgctgttgctgctgctcggcctcatgcattgtgcgtcag |
| HER2 (Extracellular | | cagcaatgtttatggtgaaaaatggcaacgggaccgcgtgcataatggccaacttctctgctgccttctcagtgaacta |
| Domain) +LAMP +EF- | | cgacaccaagagtggccctaagaacatgacccttgacctgccatcagatgccacagtggtgctcaaccgcagctcctgt |
| 1 alpha +SPD +mFLT3L; | | ggaaaagagaacacttctgaccccagtctcgtgattgcttttggaagaggacatacactcactctcaatttcacgagaa |
| DNA Sequence | | atgcaacacgttacagcgtccagctcatgagttttgtttataacttgtcagacacacaccttttccccaatgcgagctc |
| | | caaagaaatcaagactgtggaatctataactgacatcagggcagatatagataaaaaatacagatgtgttagtggcacc |
| | | caggtccacatgaacaacgtgaccgtaacgctccatgatgccaccatccaggcgtacctttccaacagcagcttcagcc |
| | | ggggagagacacgctgtgaacaagacctcgagacacaagtctgcaccggcaccgacatgaagctgagactgcccgccag |
| | | ccccgaaacccatctggacatgctgcggcatctgtaccaaggctgtcaagtggtgcaaggcaatctggaactgacatat |
| | | ctgcctaccaacgcctctctgagctttctgcaagacatccaagaagtgcaaggctacgtcctcattgcccacaaccaag |
| | | tccgacaagtgccactgcagcggctgagaatcgtgcggggcacccagctgttcgaggacaactatgctctggccgtgct |
| | | ggacaacggcgaccctctgaacaacaccacaccagtgactggcgcctctcccggcggactgagagaactgcagctgcgc |
| | | tctctgaccgagattctgaagggcggcgtgctgatccagcggaaccctcagctgtgctaccaagacaccattctgtgga |
| | | aggacatcttccacaagaacaaccagctggctctgaccctcatcgacaccaacagaagccgggcttgccacccttgcag |
| | | ccccatgtgcaagggcagcagatgttggggcgagagcagcgaggactgccagtctctgaccagaaccgtgtgtgccggc |
| | | ggatgcgccagatgcaagggccctctgccaaccgattgctgccacgaacagtgcgccgctggctgtaccggccccaagc |
| | | acagcgattgtctggcttgtctgcacttcaaccactccggcatctgcgagctgcactgcccagccctcgtgacatacaa |
| | | caccgacacattcgagagcatgcccaaccccgagggcagatacacattcggcgccagctgtgtgaccgcttgcccctac |
| | | aactatctgagcaccgacgtgggcagctgcaccctcgtgtgccctctgcacaatcaagaagtgaccgccgaggacggca |
| | | cccagagatgcgagaagtgctccaagccttgcgccagagtgtgctacggactgggcatggaacatctgcgggaagtgcg |
| | | ggccgtgaccagcgccaatatccaagaatttgccggctgcaagaagattttcggcagtctggcctttctgcccgagagc |
| | | ttcgatggcgaccccgcctctaacacagcccctctgcagccagagcagctccaagtgttcgagacactggaagagatca |
| | | ccggctatctgtacatcagcgcttggcccgactctctgcccgatctgagcgtgttccagaatctgcaagtcatcagagg |
| | | ccggattctgcacaacggcgcctattctctgacactgcaaggactgggaatcagctggctgggactgcggagtctgaga |
| | | gagctgggcagcggactggcactgatccaccacaacacccatctgtgcttcgtgcacaccgtgccttgggatcagctgt |
| | | tccggaatccccaccaagctctgctgcacaccgccaacagacccgaggatgagtgtgtgggcgaggggctggcttgcca |
| | | tcagctctgtgccagaggacactgttggggacccggccctacccagtgcgtgaactgctcccagtttctgcggggccaa |
| | | gaatgcgtggaagagtgcagagtgctccaaggactgccccgcgagtacgtgaacgccagacactgtctgccatgccacc |
| | | ccgagtgccagcctcagaatggcagcgtgacatgcttcggccccgaggccgatcagtgtgtggcttgcgctcactacaa |
| | | ggaccctcccttctgcgtggcccggtgtccttctggcgtgaaacccgatctgtcctacatgcctatctggaagttcccc |
| | | gacgaggaaggcgcttgtcagccttgccccatcaactgcacccacgaattcacctgcctgctggccagcatggggctgc |
| | | agctgaacctcacctatgagaggaaggacaacacgacggtgacaaggcttctcaacatcaaccccaacaagacctcggc |
| | | cagcgggagctgcggcgcccacctggtgactctggagctgcacagcgagggcaccaccgtcctgctcttccagttcggg |
| | | atgaatgcaagttctagccggtttttcctacaaggaatccagttgaatacaattcttcctgacgccagagaccctgcct |
| | | ttaaagctgccaacggctccctgcgagcgctgcaggccacagtcggcaattcctacaagtgcaacgcggaggagcacgt |
| | | ccgtgtcacgaaggcgttttcagtcaatatattcaaagtgtgggtccaggctttcaaggtggaaggtggccagtttggc |
| | | tctgtggaggagtgtctgctggacgagaacagcatgctgatccccatcgctgtgggtggtgccctggcggggctggtcc |
| | | tcatcgtcctcatcgcctacctcgtcggcaggaagaggagtcacgcaggctaccagactatctagtaaagatctttttc |
| | | cctctgccaaaaattatggggacatcatgaagccccttgagcatctgacttctggctaataaaggaaatttattttcat |
| | | tgcaatagtgtgttggaattttttgtgtctctcactcggaaggacataagggcggccgcggtacccgtgaggctccggt |
| | | gcccgtcagtgggcagagcgcacatcgcccacagtccccgagaagttggggggaggggtcggcaattgaaccggtgcct |
| | | agagaaggtggcgcggggtaaactgggaaagtgatgtcgtgtactggctccgcctttttcccgagggtgggggagaacc |
| | | gtatataagtgcagtagtcgccgtgaacgttctttttcgcaacgggtttgccgccagaacacagtctagaggatccgcc |
| | | gccaccatggaaaccgatacactgctgctgtgggtgctgttgctctgggttccaggatctacaggcgacatgctgccct |
| | | ttctctccatgcttgtcttgcttgtacagcccctgggaaatctgggagcagaaatgaagagcctctcgcagagatcagt |
| | | acccaacacctgcaccctagtcatgtgtagcccaacagagaatggcctgcctggtcgtgatggacgggatgggagagaa |
| | | ggtccacggggtgagaagggtgatccaggtttgccaggacctatggggctctcagggttgcagggccctacaggtccag |
| | | ttggacccaaaggagagaatggctctgctggcgaacctggaccaaagggagaacgtggactaagtggacctccaggact |
| | | tccaggtattcctggtccagctgggaaagaaggtccctctgggaagcaggggaacataggacctcaaggcaaaccaggt |
| | | cctaaaggagaggctgggcccaaaggagaagtaggtgctcctggcatgcaaggatctacaggggcaaaaggctccacag |
| | | gccccaagggagaaagaggtgcccctggtgtgcaaggagccccagggaatgctggagcagcaggacctgccggacctgc |
| | | cggtccacagggagctccaggttccagggggcccccaggactcaagggggacagaggtgttcctggagacagaggaatc |
| | | aaaggtgaaagcgggcttccagacagtgctgctctgaggcagcagatggaggccttaaaaggaaaactacagcgtctag |
| | | aggttgccttctcccactatcagaaagctgcattgttccctgatggcccctgcctgagaggcacccctgattgctactt |
| | | ctctcacagccccatcagcagcaacttcaaagtgaagttcagagagctgaccgaccatctgctgaaggactaccctgtg |
| | | accgtggccgtgaacctgcaggatgagaagcactgcaaagccctgtggtccctgtttctggcccagagatggatcgagc |
| | | agctgaaaacagtggccggcagcaagatgcagaccctgctggaagatgtgaacaccgagatccacttcgtgaccagctg |
| | | caccttccagcctctgcctgagtgcctgagattcgtgcagaccaacatcagccatctgctcaaagacacatgcacccag |
| | | ctgctggccctgaagccttgtatcggcaaagcctgccagaacttcagccggtgcctggaagttcagtgccagcctgata |
| | | gcagcacactgctgcctccaagaagccctatcgctctggaagccacagagctgcctgagcctagacctcggcag |
| mFLT3L; Protein Sequence | 209 | PCLRGTPDCYFSHSPISSNFKVKFRELTDHLLKDYPVTVAVNLQDEKHCKALWSLFLAQRWIEQLKTVAGSKMQTLLED |
| | | VNTEIHFVTSCTFQPLPECLRFVQTNISHLLKDTCTQLLALKPCIGKACQNFSRCLEVQCQPDSSTLLPPRSPIALEAT |
| | | ELPEPRPRQ |
| mFLT3L; DNA Sequence | 210 | ccgtgcctgcgcggcaccccggattgctattttagccatagcccgattagcagcaactttaaagtgaaatttcgcgaac |
| | | tgaccgatcatctgctgaaagattatccggtgaccgtggcggtgaacctgcaggatgaaaaacattgcaaagcgctgtg |
| | | gagcctgtttctggcgcagcgctggattgaacagctgaaaaccgtggcgggcagcaaaatgcagaccctgctggaagat |
| | | gtgaacaccgaaattcattttgtgaccagctgcacctttcagccgctgccggaatgcctgcgctttgtgcagaccaaca |
| | | ttagccatctgctgaaagatacctgcacccagctgctggcgctgaaaccgtgcattggcaaagcgtgccagaactttag |
| | | ccgctgcctggaagtgcagtgccagccggatagcagcaccctgctgccgccgcgcagcccgattgcgctggaagcgacc |
| | | gaactgccggaaccgcgcccgcgccag |
| | 211 | |
| HER2-LAMP-IL-12; HER2 | 212 | atggcgccccgcagcgcccggcgacccctgctgctgctactgctgttgctgctgctcggcctcatgcattgtgcgtcag |
| (Extracellular domain) | | cagcaatgtttatggtgaaaaatggcaacgggaccgcgtgcataatggccaacttctctgctgccttctcagtgaacta |
| +LAMP +EF-1alpha +IL-12; | | cgacaccaagagtggccctaagaacatgacccttgacctgccatcagatgccacagtggtgctcaaccgcagctcctgt |
| DNA Sequence | | ggaaaagagaacacttctgaccccagtctcgtgattgcttttggaagaggacatacactcactctcaatttcacgagaa |
| | | atgcaacacgttacagcgtccagctcatgagttttgtttataacttgtcagacacacaccttttccccaatgcgagctc |
| | | caaagaaatcaagactgtggaatctataactgacatcagggcagatatagataaaaaatacagatgtgttagtggcacc |
| | | caggtccacatgaacaacgtgaccgtaacgctccatgatgccaccatccaggcgtacctttccaacagcagcttcagcc |
| | | ggggagagacacgctgtgaacaagacctcgagacacaagtctgcaccggcaccgacatgaagctgagactgcccgccag |
| | | ccccgaaacccatctggacatgctgcggcatctgtaccaaggctgtcaagtggtgcaaggcaatctggaactgacatat |
| | | ctgcctaccaacgcctctctgagctttctgcaagacatccaagaagtgcaaggctacgtcctcattgcccacaaccaag |
| | | tccgacaagtgccactgcagcggctgagaatcgtgcggggcacccagctgttcgaggacaactatgctctggccgtgct |
| | | ggacaacggcgaccctctgaacaacaccacaccagtgactggcgcctctcccggcggactgagagaactgcagctgcgc |
| | | tctctgaccgagattctgaagggcggcgtgctgatccagcggaaccctcagctgtgctaccaagacaccattctgtgga |
| | | aggacatcttccacaagaacaaccagctggctctgaccctcatcgacaccaacagaagccgggcttgccacccttgcag |
| | | ccccatgtgcaagggcagcagatgttggggcgagagcagcgaggactgccagtctctgaccagaaccgtgtgtgccggc |
| | | ggatgcgccagatgcaagggccctctgccaaccgattgctgccacgaacagtgcgccgctggctgtaccggccccaagc |
| | | acagcgattgtctggcttgtctgcacttcaaccactccggcatctgcgagctgcactgcccagccctcgtgacatacaa |
| | | caccgacacattcgagagcatgcccaaccccgagggcagatacacattcggcgccagctgtgtgaccgcttgcccctac |
| | | aactatctgagcaccgacgtgggcagctgcaccctcgtgtgccctctgcacaatcaagaagtgaccgccgaggacggca |
| | | cccagagatgcgagaagtgctccaagccttgcgccagagtgtgctacggactgggcatggaacatctgcgggaagtgcg |
| | | ggccgtgaccagcgccaatatccaagaatttgccggctgcaagaagattttcggcagtctggcctttctgcccgagagc |
| | | ttcgatggcgaccccgcctctaacacagcccctctgcagccagagcagctccaagtgttcgagacactggaagagatca |
| | | ccggctatctgtacatcagcgcttggcccgactctctgcccgatctgagcgtgttccagaatctgcaagtcatcagagg |
| | | ccggattctgcacaacggcgcctattctctgacactgcaaggactgggaatcagctggctgggactgcggagtctgaga |
| | | gagctgggcagcggactggcactgatccaccacaacacccatctgtgcttcgtgcacaccgtgccttgggatcagctgt |
| | | tccggaatccccaccaagctctgctgcacaccgccaacagacccgaggatgagtgtgtgggcgaggggctggcttgcca |
| | | tcagctctgtgccagaggacactgttggggacccggccctacccagtgcgtgaactgctcccagtttctgcggggccaa |
| | | gaatgcgtggaagagtgcagagtgctccaaggactgccccgcgagtacgtgaacgccagacactgtctgccatgccacc |
| | | ccgagtgccagcctcagaatggcagcgtgacatgcttcggccccgaggccgatcagtgtgtggcttgcgctcactacaa |
| | | ggaccctcccttctgcgtggcccggtgtccttctggcgtgaaacccgatctgtcctacatgcctatctggaagttcccc |
| | | gacgaggaaggcgcttgtcagccttgccccatcaactgcacccacgaattcacctgcctgctggccagcatggggctgc |
| | | agctgaacctcacctatgagaggaaggacaacacgacggtgacaaggcttctcaacatcaaccccaacaagacctcggc |
| | | cagcgggagctgcggcgcccacctggtgactctggagctgcacagcgagggcaccaccgtcctgctcttccagttcggg |
| | | atgaatgcaagttctagccggtttttcctacaaggaatccagttgaatacaattcttcctgacgccagagaccctgcct |
| | | ttaaagctgccaacggctccctgcgagcgctgcaggccacagtcggcaattcctacaagtgcaacgcggaggagcacgt |
| | | ccgtgtcacgaaggcgttttcagtcaatatattcaaagtgtgggtccaggctttcaaggtggaaggtggccagtttggc |
| | | tctgtggaggagtgtctgctggacgagaacagcatgctgatccccatcgctgtgggtggtgccctggcggggctggtcc |
| | | tcatcgtcctcatcgcctacctcgtcggcaggaagaggagtcacgcaggctaccagactatctagtaaagatctttttc |
| | | cctctgccaaaaattatggggacatcatgaagccccttgagcatctgacttctggctaataaaggaaatttattttcat |
| | | tgcaatagtgtgttggaattttttgtgtctctcactcggaaggacataagggcggccgcggtacccgtgaggctccggt |
| | | gcccgtcagtgggcagagcgcacatcgcccacagtccccgagaagttggggggaggggtcggcaattgaaccggtgcct |
| | | agagaaggtggcgcggggtaaactgggaaagtgatgtcgtgtactggctccgcctttttcccgagggtgggggagaacc |
| | | gtatataagtgcagtagtcgccgtgaacgttctttttcgcaacgggtttgccgccagaacacagtctagaggatccgcc |
| | | gccaccatggagaggaccctggtgtgcctggtggtgatcttcctgggcaccgtggcccacaagagcagccctcaaggcc |
| | | ctgataggctgctgattaggctgaggcacctgatcgacatcgtggagcagctgaagatctacgagaacgacctggaccc |
| | | tgagctgctgagcgcccctcaagacgtgaagggccactgcgagcacgccgccttcgcctgctttcagaaggccaagctg |
| | | aagcctagcaaccctggcaacaacaagaccttcatcatcgacctggtggctcagctgaggaggaggctgcctgctagga |
| | | ggggcggcaagaagcagaagcacatcgccaagtgccctagctgcgacagctacgagaagaggacccctaaggagttcct |
| | | ggagaggctgaagtggctgctgcagaagatgatccatcagcacctgagctgaac |
| Murine IL-12 (IL-12 p36- | 213 | MVSVPTASPSASSSSSQCRSSMCQSRYLLFLATLALLNHLSLARVIPVSGPARCLSQSRNLLKTTDDMVKTAREKLKHY |
| P2A-IL-12p40) Protein | | SCTAEDIDHEDITRDQTSTLKTCLPLELHKNESCLATRETSSTTRGSCLPPQKTSLMMTLCLGSIYEDLKMYQTEFQAI |
| Sequence | | NAALQNHNHQQIILDKGMLVAIDELMQSLNHNGETLRQKPPVGEADPYRVKMKLCILLHAFSTRVVTINRVMGYLSSAA |
| | | AAGSGATNFSLLKQAGDVEENPGPGSCPQKLTISWFAIVLLVSPLMAMWELEKDVYVVEVDWTPDAPGETVNLTCDTPE |
| | | EDDITWTSDQRHGVIGSGKTLTITVKEFLDAGQYTCHKGGETLSHSHLLLHKKENGIWSTEILKNFKNKTFLKCEAPNY |
| | | SGRFTCSWLVQRNMDLKFNIKSSSSSPDSRAVTCGMASLSAEKVTLDQRDYEKYSVSCQEDVTCPTAEETLPIELALEA |
| | | RQQNKYENYSTSFFIRDIIKPDPPKNLQMKPLKNSQVEVSWEYPDSWSTPHSYFSLKFFVRIQRKKEKMKETEEGCNQK |
| | | GAFLVEKTSTEVQCKGGNVCVQAQDRYYNSSCSKWACVPCRVRS |
| Murine IL-12 (IL-12 p36- | 214 | atggtcagcgttccaacagcctcaccctcggcatccagcagctcctctcagtgccggtccagcatgtgtcaatcacgct |
| P2A-IL-12p40) DNA | | acctcctctttttggccacccttgccctcctaaaccacctcagtttggccagggtcattccagtctctggacctgccag |
| Sequence | | gtgtcttagccagtcccgaaacctgctgaagaccacagatgacatggtgaagacggccagagaaaaactgaaacattat |
| | | tcctgcactgctgaagacatcgatcatgaagacatcacacgggaccaaaccagcacattgaagacctgtttaccactgg |
| | | aactacacaagaacgagagttgcctggctactagagagacttcttccacaacaagagggagctgcctgcccccacagaa |
| | | gacgtctttgatgatgaccctgtgccttggtagcatctatgaggacttgaagatgtaccagacagagttccaggccatc |
| | | aacgcagcacttcagaatcacaaccatcagcagatcattcttgacaagggcatgctggtggccatcgatgagctgatgc |
| | | agtctctgaatcataatggcgagactctgcgccagaaacctcctgtgggagaagcagacccttacagagtgaaaatgaa |
| | | gctctgcatcctgcttcacgccttcagcacccgcgtcgtgaccatcaacagggtgatgggctatctgagctccgccgcg |
| | | gccgcaggatctggggccaccaacttttcattgctcaagcaggcgggcgatgtggaggaaaaccctggccccggatcct |
| | | gtcctcagaagctaaccatctcctggtttgccatcgttttgctggtgtctccactcatggccatgtgggagctggagaa |
| | | agacgtttatgttgtagaggtggactggactcccgatgcccctggagaaacagtgaacctcacctgtgacacgcctgaa |
| | | gaagatgacatcacctggacctcagaccagagacatggagtcataggctctggaaagaccctgaccatcactgtcaaag |
| | | agtttcttgatgctggccagtacacctgccacaaaggaggcgagactctgagccactcacatctgctgctccacaagaa |
| | | ggaaaatggaatttggtccactgaaattttaaagaatttcaagaacaagactttcctgaagtgtgaagcaccaaattac |
| | | tccggacggttcacgtgctcatggctggtgcaaagaaacatggacttgaagttcaacatcaagagcagtagcagttccc |
| | | ctgactctcgggcagtgacatgtggaatggcgtctctgtctgcagagaaggtcacactggaccaaagggactatgagaa |
| | | gtattcagtgtcctgccaggaggatgtcacctgcccaactgccgaggagaccctgcccattgaactggcgttggaagca |
| | | cggcagcagaataaatatgagaactacagcaccagcttcttcatcagggacatcatcaaaccagacccgcccaagaact |
| | | tgcagatgaagcctttgaagaactcacaggtggaggtcagctgggagtaccctgactcctggagcactccccattccta |
| | | cttctccctcaagttctttgttcgaatccagcgcaagaaagaaaagatgaaggagacagaggaggggtgtaaccagaaa |
| | | ggtgcgttcctcgtagagaagacatctaccgaagtccaatgcaaaggcgggaatgtctgcgtgcaagctcaggatcgct |
| | | attacaattcctcatgcagcaagtgggcatgtgttccctgcagggtccgatcctag |
| | 215 | |
| HER2-LAMP-IL-21; HER2 | 216 | atggcgccccgcagcgcccggcgacccctgctgctgctactgctgttgctgctgctcggcctcatgcattgtgcgtcag |
| (Extracellular domain) | | cagcaatgtttatggtgaaaaatggcaacgggaccgcgtgcataatggccaacttctctgctgccttctcagtgaacta |
| +LAMP +EF-1alpha +IL-21; | | cgacaccaagagtggccctaagaacatgacccttgacctgccatcagatgccacagtggtgctcaaccgcagctcctgt |
| DNA Sequence | | ggaaaagagaacacttctgaccccagtctcgtgattgcttttggaagaggacatacactcactctcaatttcacgagaa |
| | | atgcaacacgttacagcgtccagctcatgagttttgtttataacttgtcagacacacaccttttccccaatgcgagctc |
| | | caaagaaatcaagactgtggaatctataactgacatcagggcagatatagataaaaaatacagatgtgttagtggcacc |
| | | caggtccacatgaacaacgtgaccgtaacgctccatgatgccaccatccaggcgtacctttccaacagcagcttcagcc |
| | | ggggagagacacgctgtgaacaagacctcgagacacaagtctgcaccggcaccgacatgaagctgagactgcccgccag |
| | | ccccgaaacccatctggacatgctgcggcatctgtaccaaggctgtcaagtggtgcaaggcaatctggaactgacatat |
| | | ctgcctaccaacgcctctctgagctttctgcaagacatccaagaagtgcaaggctacgtcctcattgcccacaaccaag |
| | | tccgacaagtgccactgcagcggctgagaatcgtgcggggcacccagctgttcgaggacaactatgctctggccgtgct |
| | | ggacaacggcgaccctctgaacaacaccacaccagtgactggcgcctctcccggcggactgagagaactgcagctgcgc |
| | | tctctgaccgagattctgaagggcggcgtgctgatccagcggaaccctcagctgtgctaccaagacaccattctgtgga |
| | | aggacatcttccacaagaacaaccagctggctctgaccctcatcgacaccaacagaagccgggcttgccacccttgcag |
| | | ccccatgtgcaagggcagcagatgttggggcgagagcagcgaggactgccagtctctgaccagaaccgtgtgtgccggc |
| | | ggatgcgccagatgcaagggccctctgccaaccgattgctgccacgaacagtgcgccgctggctgtaccggccccaagc |
| | | acagcgattgtctggcttgtctgcacttcaaccactccggcatctgcgagctgcactgcccagccctcgtgacatacaa |
| | | caccgacacattcgagagcatgcccaaccccgagggcagatacacattcggcgccagctgtgtgaccgcttgcccctac |
| | | aactatctgagcaccgacgtgggcagctgcaccctcgtgtgccctctgcacaatcaagaagtgaccgccgaggacggca |
| | | cccagagatgcgagaagtgctccaagccttgcgccagagtgtgctacggactgggcatggaacatctgcgggaagtgcg |
| | | ggccgtgaccagcgccaatatccaagaatttgccggctgcaagaagattttcggcagtctggcctttctgcccgagagc |
| | | ttcgatggcgaccccgcctctaacacagcccctctgcagccagagcagctccaagtgttcgagacactggaagagatca |
| | | ccggctatctgtacatcagcgcttggcccgactctctgcccgatctgagcgtgttccagaatctgcaagtcatcagagg |
| | | ccggattctgcacaacggcgcctattctctgacactgcaaggactgggaatcagctggctgggactgcggagtctgaga |
| | | gagctgggcagcggactggcactgatccaccacaacacccatctgtgcttcgtgcacaccgtgccttgggatcagctgt |
| | | tccggaatccccaccaagctctgctgcacaccgccaacagacccgaggatgagtgtgtgggcgaggggctggcttgcca |
| | | tcagctctgtgccagaggacactgttggggacccggccctacccagtgcgtgaactgctcccagtttctgcggggccaa |
| | | gaatgcgtggaagagtgcagagtgctccaaggactgccccgcgagtacgtgaacgccagacactgtctgccatgccacc |
| | | ccgagtgccagcctcagaatggcagcgtgacatgcttcggccccgaggccgatcagtgtgtggcttgcgctcactacaa |
| | | ggaccctcccttctgcgtggcccggtgtccttctggcgtgaaacccgatctgtcctacatgcctatctggaagttcccc |
| | | gacgaggaaggcgcttgtcagccttgccccatcaactgcacccacgaattcacctgcctgctggccagcatggggctgc |
| | | agctgaacctcacctatgagaggaaggacaacacgacggtgacaaggcttctcaacatcaaccccaacaagacctcggc |
| | | cagcgggagctgcggcgcccacctggtgactctggagctgcacagcgagggcaccaccgtcctgctcttccagttcggg |
| | | atgaatgcaagttctagccggtttttcctacaaggaatccagttgaatacaattcttcctgacgccagagaccctgcct |
| | | ttaaagctgccaacggctccctgcgagcgctgcaggccacagtcggcaattcctacaagtgcaacgcggaggagcacgt |
| | | ccgtgtcacgaaggcgttttcagtcaatatattcaaagtgtgggtccaggctttcaaggtggaaggtggccagtttggc |
| | | tctgtggaggagtgtctgctggacgagaacagcatgctgatccccatcgctgtgggtggtgccctggcggggctggtcc |
| | | tcatcgtcctcatcgcctacctcgtcggcaggaagaggagtcacgcaggctaccagactatctagtaaagatctttttc |
| | | cctctgccaaaaattatggggacatcatgaagccccttgagcatctgacttctggctaataaaggaaatttattttcat |
| | | tgcaatagtgtgttggaattttttgtgtctctcactcggaaggacataagggcggccgcggtacccgtgaggctccggt |
| | | gcccgtcagtgggcagagcgcacatcgcccacagtccccgagaagttggggggaggggtcggcaattgaaccggtgcct |
| | | agagaaggtggcgcggggtaaactgggaaagtgatgtcgtgtactggctccgcctttttcccgagggtgggggagaacc |
| | | gtatataagtgcagtagtcgccgtgaacgttctttttcgcaacgggtttgccgccagaacacagtctagaggatccgcc |
| | | gccaccatggagaggaccctggtgtgcctggtggtgatcttcctgggcaccgtggcccacaagagcagccctcaaggcc |
| | | ctgataggctgctgattaggctgaggcacctgatcgacatcgtggagcagctgaagatctacgagaacgacctggaccc |
| | | tgagctgctgagcgcccctcaagacgtgaagggccactgcgagcacgccgccttcgcctgctttcagaaggccaagctg |
| | | aagcctagcaaccctggcaacaacaagaccttcatcatcgacctggtggctcagctgaggaggaggctgcctgctagga |
| | | ggggcggcaagaagcagaagcacatcgccaagtgccctagctgcgacagctacgagaagaggacccctaaggagttcct |
| | | ggagaggctgaagtggctgctgcagaagatgatccatcagcacctgagctgaac |
| Exemplary Murine IL-21 | 217 | MERTLVCLVVIFLGTVAHKSSPQGPDRLLIRLRHLIDIVEQLKIYENDLDPELLSAPQDVKGHCEHAAFACFQKAKLKP |
| Protein Sequence | | SNPGNNKTFIIDLVAQLRRRLPARRGGKKQKHIAKCPSCDSYEKRTPKEFLERLKWLLQKMIHQHLS |
| Exemplary Murine IL-21 | 218 | atggagaggaccctggtgtgcctggtggtgatcttcctgggcaccgtggcccacaagagcagccctcaaggccctgata |
| DNA Sequence | | ggctgctgattaggctgaggcacctgatcgacatcgtggagcagctgaagatctacgagaacgacctggaccctgagct |
| | | gctgagcgcccctcaagacgtgaagggccactgcgagcacgccgccttcgcctgctttcagaaggccaagctgaagcct |
| | | agcaaccctggcaacaacaagaccttcatcatcgacctggtggctcagctgaggaggaggctgcctgctaggaggggcg |
| | | gcaagaagcagaagcacatcgccaagtgccctagctgcgacagctacgagaagaggacccctaaggagttcctggagag |
| | | gctgaagtggctgctgcagaagatgatccatcagcacctgagctga |
| CD80 (Extracellular Domain | 219 | VDEQLSKSVKDKVLLPCRYNSPHEDESEDRIYWQKHDKVVLSVIAGKLKVWPEYKNRTLYDNTTYSLIILGLVLSDRGT |
| +Fc Domain) Protein | | YSCVVQKKERGTYEVKHLALVKLSIKADFSTPNITESGNPSADTKRITCFASGGFPKPRFSWLENGRELPGINTTISQD |
| Sequence | | PESELYTISSQLDFNTTRNHTIKCLIKYGDAHVSEDFTWEKPPEDPPDSKNDIGGGGSGGGGSPRGPTIKPCPPCKCPA |
| | | PNLEGGPSVFIFPPKIKDVLMISLSPIVTCVVVDVSEDDPDVQISWFVNNVEVHTAQTQTHREDYNSTLRVVSALPIQH |
| | | QDWMSGKAFACAVNNKDLPAPIERTISKPKGSVRAPQVYVLPPPEEEMTKKQVTLTCMVTDFMPEDIYVEWTNNGKTEL |
| | | NYKNTEPVLDSDGSYFMYSKLRVEKKNWVERNSYSCSVVHEGLHNHHTTKSFSRTPGK |
| CD80 (Extracellular Domain | 220 | gtggacgagcagctgagcaagagcgtgaaggacaaggtgctgctgccttgtaggtacaacagccctcacgaggacgaga |
| +Fc Domain) DNA | | gcgaggataggatctactggcagaagcacgacaaggtagtgctgagtgtgatagccggcaagctgaaggtgtggcctga |
| Sequence | | gtacaagaataggaccctgtacgacaacaccacctacagcctgatcatcctgggcctggtgctgagcgataggggtacc |
| | | tacagctgcgtggtgcagaagaaggagaggggcacctacgaggtgaagcacctggccctggtgaagctgagcatcaagg |
| | | ccgacttcagcacccctaacatcaccgagagcggcaaccctagcgccgacaccaagaggatcacctgcttcgctagcgg |
| | | cggcttccctaagcctaggttcagctggctggagaacggaagggagctgcctggcataaacacgaccatatctcaagac |
| | | cctgagagcgagctgtacaccatcagctctcagctggacttcaacaccacccgcaatcacaccatcaagtgcctgatca |
| | | agtacggcgacgcccacgtgagcgaggacttcacctgggagaagcctcctgaggaccctcctgacagcaagaacgatat |
| | | cggaggcggaggaagcggaggcggaggaagccccagagggcccacaatcaagccctgtcctccatgcaaatgcccagca |
| | | cctaacctcgagggtggaccatccgtcttcatcttccctccaaagatcaaggatgtactcatgatctccctgagcccca |
| | | tagtcacatgtgtggtggtggatgtgagcgaggatgacccagatgtccagatcagctggtttgtgaacaacgtggaagt |
| | | acacacagctcagacacaaacccatagagaggattacaacagtactctccgggtggtcagtgccctccccatccagcac |
| | | caggactggatgagtggcaaggcgttcgcatgcgcggtcaacaacaaagacctcccagcgcccatcgagagaaccatct |
| | | caaaacccaaagggtcagtaagagctccacaggtatatgtcttgcctccaccagaagaagagatgactaagaaacaggt |
| | | cactctgacctgcatggtcacagacttcatgcctgaagacatttacgtggagtggaccaacaacgggaaaacagagcta |
| | | aactacaagaacactgaaccagtcctggactctgatggttcttacttcatgtacagcaagctgagagtggaaaagaaga |
| | | actgggtggaaagaaatagctactcctgttcagtggtccacgagggtctgcacaatcaccacacgactaagagcttctc |
| | | ccggactccgggtaaa |
| NY-ESO1-LAMP Protein | 221 | MAPRSARRPLLLLLLLLLLGLMHCASAAMFMVKNGNGTACIMANFSAAFSVNYDTKSGPKNMTLDLPSDATVVLNRSSC |
| Sequence | | GKENTSDPSLVIAFGRGHTLTLNFTRNATRYSVQLMSFVYNLSDTHLFPNASSKEIKTVESITDIRADIDKKYRCVSGT |
| | | QVHMNNVTVTLHDATIQAYLSNSSFSRGETRCEQDLEMQAEGRGTGGSTGDADGPGGPGIPDGPGGNAGGPGEAGATGG |
| | | RGPRGAGAARASGPGGGAPRGPHGGAASGLNGCCRCGARGPESRLLEFYLAMPFATPMEAELARRSLAQDAPPLPVPGV |
| | | LLKEFTVSGNILTIRLTAADHRQLQLSISSCLQQQRRTCLLASMGLQLNLTYERKDNTTVTRLLNINPNKTSASGSCGA |
| | | HLVTLELHSEGTTVLLFQFGMNASSSRFFLQGIQLNTILPDARDPAFKAANGSLRALQATVGNSYKCNAEEHVRVTKAF |
| | | SVNIFKVWVQAFKVEGGQFGSVEECLLDENSM |
| NY-ESO1-LAMP-IL-15; | 222 | atggcgccccgcagcgcccggcgacccctgctgctgctactgctgttgctgctgctcggcctcatgcattgtgcgtcag |
| NY-ESO1 +LAMP +EF- | | cagcaatgtttatggtgaaaaatggcaacgggaccgcgtgcataatggccaacttctctgctgccttctcagtgaacta |
| 1alpha +Ig-Kappa +IL-15; | | cgacaccaagagtggccctaagaacatgacccttgacctgccatcagatgccacagtggtgctcaaccgcagctcctgt |
| DNA Sequence | | ggaaaagagaacacttctgaccccagtctcgtgattgcttttggaagaggacatacactcactctcaatttcacgagaa |
| | | atgcaacacgttacagcgtccagctcatgagttttgtttataacttgtcagacacacaccttttccccaatgcgagctc |
| | | caaagaaatcaagactgtggaatctataactgacatcagggcagatatagataaaaaatacagatgtgttagtggcacc |
| | | caggtccacatgaacaacgtgaccgtaacgctccatgatgccaccatccaggcgtacctttccaacagcagcttcagcc |
| | | ggggagagacacgctgtgaacaagacctcgagatgcaagccgaaggcagaggaaccggtggatctactggggatgctga |
| | | tggtcccggtggacccggtattccagatggacccggcggaaatgctggcggtcccggcgaagctggtgctactggtgga |
| | | agaggaccaagaggcgctggtgccgctagagcttctggccccggtggcggagcccctagaggaccacatggcggagctg |
| | | catctggactgaatggctgctgtagatgcggcgccagaggaccagaaagccggctgcttgagttctatctggccatgcc |
| | | tttcgccacaccaatggaagccgagctggctagacgcagtctggcccaagatgctcctccacttccagttccgggcgtg |
| | | ctgctgaaagagtttaccgtcagcggcaacattctgaccatccggctgacagccgccgaccatagacagctgcaactga |
| | | gcatctccagctgcctccagcagcagagaagagaattcacctgcctgctggccagcatggggctgcagctgaacctcac |
| | | ctatgagaggaaggacaacacgacggtgacaaggcttctcaacatcaaccccaacaagacctcggccagcgggagctgc |
| | | ggcgcccacctggtgactctggagctgcacagcgagggcaccaccgtcctgctcttccagttcgggatgaatgcaagtt |
| | | ctagccggtttttcctacaaggaatccagttgaatacaattcttcctgacgccagagaccctgcctttaaagctgccaa |
| | | cggctccctgcgagcgctgcaggccacagtcggcaattcctacaagtgcaacgcggaggagcacgtccgtgtcacgaag |
| | | gcgttttcagtcaatatattcaaagtgtgggtccaggctttcaaggtggaaggtggccagtttggctctgtggaggagt |
| | | gtctgctggacgagaacagcatgctgatccccatcgctgtgggtggtgccctggcggggctggtcctcatcgtcctcat |
| | | cgcctacctcgtcggcaggaagaggagtcacgcaggctaccagactatctagtaaagatctttttccctctgccaaaaa |
| | | ttatggggacatcatgaagccccttgagcatctgacttctggctaataaaggaaatttattttcattgcaatagtgtgt |
| | | tggaattttttgtgtctctcactcggaaggacataagggcggccgcggtacccgtgaggctccggtgcccgtcagtggg |
| | | cagagcgcacatcgcccacagtccccgagaagttggggggaggggtcggcaattgaaccggtgcctagagaaggtggcg |
| | | cggggtaaactgggaaagtgatgtcgtgtactggctccgcctttttcccgagggtgggggagaaccgtatataagtgca |
| | | gtagtcgccgtgaacgttctttttcgcaacgggtttgccgccagaacacagtctagaggatccgccgccaccatggaaa |
| | | ccgatacactgctgctgtgggtgctgttgctctgggttccaggatctacaggcgacaactggatcgacgtccgctacga |
| | | cctggaaaagatcgagagcctgatccagagcatccacatcgacaccacactgtacaccgacagcgactttcaccccagc |
| | | tgcaaagtgaccgccatgaactgctttctgctggaactgcaagtgatcctgcacgagtacagcaacatgaccctgaacg |
| | | agacagtgcggaacgtgctgtacctggccaatagcaccctgagcagcaacaagaacgtggccgagagcggctgcaaaga |
| | | gtgcgaggaactggaagagaaaaccttcaccgagtttctgcagagcttcatccggatcgtgcagatgttcatcaacacc |
| | | agc |
| NY-ESO1 Protein Sequence | 223 | MQAEGRGTGGSTGDADGPGGPGIPDGPGGNAGGPGEAGATGGRGPRGAGAARASGPGGGAPRGPHGGAASGLNGCCRCG |
| | | ARGPESRLLEFYLAMPFATPMEAELARRSLAQDAPPLPVPGVLLKEFTVSGNILTIRLTAADHRQLQLSISSCLQQQRR |
| NY-ESO1 (-tm) DNA | 224 | atgcaagccgaaggcagaggaaccggtggatctactggggatgctgatggtcccggtggacccggtattccagatggac |
| Sequence | | ccggcggaaatgctggcggtcccggcgaagctggtgctactggtggaagaggaccaagaggcgctggtgccgctagagc |
| | | ttctggccccggtggcggagcccctagaggaccacatggcggagctgcatctggactgaatggctgctgtagatgcggc |
| | | gccagaggaccagaaagccggctgcttgagttctatctggccatgcctttcgccacaccaatggaagccgagctggcta |
| | | gacgcagtctggcccaagatgctcctccacttccagttccgggcgtgctgctgaaagagtttaccgtcagcggcaacat |
| | | tctgaccatccggctgacagccgccgaccatagacagctgcaactgagcatctccagctgcctccagcagcagagaaga |
| Ig-kappa and IL-15 protein | 225 | METDTLLLWVLLLWVPGSTGDNWIDVRYDLEKIESLIQSIHIDTTLYTDSDFHPSCKVTAMNCFLLELQVILHEYSNMT |
| sequence | | LNETVRNVLYLANSTLSSNKNVAESGCKECEELEEKTFTEFLQSFIRIVQMFINTS |
| Ig-kappa and IL-15 DNA | 226 | |
| sequence | | |
| ITI-COVID-19 Bicistronic | 227 | SccFIG.28C |
| Vaccine (ITI-Bicistronic-S1- | | |
| LAMP-RBG pA-EF2-S2P | | |
| BHG pA; First Generation | | |
| COVID-19 Vaccine); Protein | | |
| Sequence | | |
| ITI-COVID-19 Bicistronic | 228 | SccFIG.28C |
| Vaccine (ITI-Bicistronic-S1- | | |
| LAMP-RBG pA-EF2-S2P | | |
| BHG pA; First Generation | | |
| COVID-19 Vaccine); DNA | | |
| Sequence | | |
| Spike-LAMP polypeptide | 229 | MAPRSARRPLLLLLLLLLLGLMHCASAAMFMVKNGNGTACIMANFSAAFSVNYDTKSGPKNMTLDLPSDATVVLNRSSC |
| sequence used for Spike- | | GKENTSDPSLVIAFGRGHTLTLNFTRNATRYSVQLMSFVYNLSDTHLFPNASSKEIKTVESITDIRADIDKKYRCVSGT |
| LAMP-sCD40L; SARS-CoV- | | QVHMNNVTVTLHDATIQAYLSNSSFSRGETRCEQDLEVNFTTRTQLPPAYTNSFTRGVYYPDKVFRSSVLHSTQDLFLP |
| 2 B.1.351 Spike (South Africa | | FFSNVTWFHAIHVSGTNGTKRFANPVLPFNDGVYFASTEKSNIIRGWIFGTTLDSKTQSLLIVNNATNVVIKVCEFQFC |
| Variant, without SP and TM) | | NDPFLGVYYHKNNKSWMESEFRVYSSANNCTFEYVSQPFLMDLEGKQGNFKNLREFVFKNIDGYFKIYSKHTPINLVRG |
| +LAMP +EF-1alpha +SPD | | LPQGFSALEPLVDLPIGINITRFQTLHISYLTPGDSSSGWTAGAAAYYVGYLQPRTFLLKYNENGTITDAVDCALDPLS |
| +sCD40L | | ETKCTLKSFTVEKGIYQTSNFRVQPTESIVRFPNITNLCPFGEVFNATRFASVYAWNRKRISNCVADYSVLYNSASFST |
| | | FKCYGVSPTKLNDLCFTNVYADSFVIRGDEVRQIAPGQTGNIADYNYKLPDDFTGCVIAWNSNNLDSKVGGNYNYLYRL |
| | | FRKSNLKPFERDISTEIYQAGSTPCNGVKGFNCYFPLQSYGFQPTYGVGYQPYRVVVLSFELLHAPATVCGPKKSTNLV |
| | | KNKCVNFNFNGLTGTGVLTESNKKFLPFQQFGRDIADTTDAVRDPQTLEILDITPCSFGGVSVITPGTNTSNQVAVLYQ |
| | | GVNCTEVPVAIHADQLTPTWRVYSTGSNVFQTRAGCLIGAEHVNNSYECDIPIGAGICASYQTQTNSPRRARSVASQSI |
| | | IAYTMSLGVENSVAYSNNSIAIPTNFTISVTTEILPVSMTKTSVDCTMYICGDSTECSNLLLQYGSFCTQLNRALTGIA |
| | | VEQDKNTQEVFAQVKQIYKTPPIKDFGGFNFSQILPDPSKPSKRSFIEDLLFNKVTLADAGFIKQYGDCLGDIAARDLI |
| | | CAQKFNGLTVLPPLLTDEMIAQYTSALLAGTITSGWTFGAGAALQIPFAMQMAYRFNGIGVTQNVLYENQKLIANQFNS |
| | | AIGKIQDSLSSTASALGKLQDVVNQNAQALNTLVKQLSSNFGAISSVLNDILSRLDKVEAEVQIDRLITGRLQSLQTYV |
| | | TQQLIRAAEIRASANLAATKMSECVLGQSKRVDFCGKGYHLMSFPQSAPHGVVFLHVTYVPAQEKNFTTAPAICHDGKA |
| | | HFPREGVFVSNGTHWFVTQRNFYEPQIITTDNTFVSGNCDVVIGIVNNTVYDPLQPELDSFKEELDKYFKNHTSPDVDL |
| | | GDISGINASVVNIQKEIDRLNEVAKNLNESLIDLQELGKYEQYIKWPWYCMTSCCSCLKGCCSCGSCCKFDEDDSEPVL |
| | | KGVKLHYTTCLLASMGLQLNLTYERKDNTTVTRLLNINPNKTSASGSCGAHLVTLELHSEGTTVLLFQFGMNASSSRFF |
| | | LQGIQLNTILPDARDPAFKAANGSLRALQATVGNSYKCNAEEHVRVTKAFSVNIFKVWVQAFKVEGGQFGSVEECLLDE |
| | | NSM |
| Spike-LAMP-sCD40L; | 230 | atggcgccccgcagcgcccggcgacccctgctgctgctactgctgttgctgctgctcggcctcatgcattgtgcgtcag |
| SARS-CoV-2 B.1.351 Spike | | cagcaatgtttatggtgaaaaatggcaacgggaccgcgtgcataatggccaacttctctgctgccttctcagtgaacta |
| (South Africa Variant, | | cgacaccaagagtggccctaagaacatgacccttgacctgccatcagatgccacagtggtgctcaaccgcagctcctgt |
| Without SP and TM) | | ggaaaagagaacacttctgaccccagtctcgtgattgcttttggaagaggacatacactcactctcaatttcacgagaa |
| +LAMP +EF-1alpha +SPD | | atgcaacacgttacagcgtccagctcatgagttttgtttataacttgtcagacacacaccttttccccaatgcgagctc |
| +sCD40L; DNA Sequence | | caaagaaatcaagactgtggaatctataactgacatcagggcagatatagataaaaaatacagatgtgttagtggcacc |
| | | caggtccacatgaacaacgtgaccgtaacgctccatgatgccaccatccaggcgtacctttccaacagcagcttcagcc |
| | | ggggagagacacgctgtgaacaagacctcgaggtcaacttcaccaccagaacacagctgcctccagcctacaccaacag |
| | | cttcaccagaggcgtgtactaccccgacaaggtgttcagatccagcgtgctgcactctacccaggacctgttcctgcct |
| | | ttcttcagcaacgtgacctggttccacgccatccacgtgtccggcaccaatggcaccaagagattcgccaatcctgtgc |
| | | tgcccttcaacgacggggtgtactttgccagcaccgagaagtccaacatcatcagaggctggatcttcggcaccacact |
| | | ggacagcaagacccagagcctgctgatcgtgaacaacgccaccaacgtggtcatcaaagtgtgcgagttccagttctgc |
| | | aacgaccccttcctgggcgtctactaccacaagaacaacaagagctggatggaaagcgagttccgggtgtacagcagcg |
| | | ccaacaactgcaccttcgagtacgtgtcccagcctttcctgatggacctggaaggcaagcagggcaacttcaagaacct |
| | | gcgcgagttcgtgttcaagaacatcgacggctacttcaaaatctacagcaagcacacccctatcaacctcgtgcgggga |
| | | ctgcctcagggcttttctgctctggaacccctggtggatctgcccatcggcatcaacatcacccggtttcagaccctgc |
| | | acatcagctacctgacacctggcgatagcagctctggatggacagctggcgccgctgcctactatgtgggatacctgca |
| | | gcctcggaccttcctgctgaagtacaacgagaacggcaccatcaccgacgccgtggattgtgctctggatcctctgagc |
| | | gagacaaagtgcaccctgaagtccttcaccgtggaaaagggcatctaccagaccagcaacttccgggtgcagcccaccg |
| | | aatccatcgtgcggttccccaatatcaccaatctgtgccccttcggcgaggtgttcaatgccaccagattcgcctctgt |
| | | gtacgcctggaaccggaagcggatcagcaattgcgtggccgactactccgtgctgtacaactccgccagcttcagcacc |
| | | ttcaagtgctacggcgtgtcccctaccaagctgaacgacctgtgcttcacaaacgtgtacgccgacagcttcgtgatcc |
| | | ggggagatgaagtgcggcagattgcccctggacagaccggcaatatcgccgactacaactacaagctgcccgacgactt |
| | | caccggctgtgtgattgcctggaacagcaacaacctggactccaaagtcggcggcaactacaattacctgtaccggctg |
| | | ttccggaagtccaatctgaagcccttcgagcgggacatcagcaccgaaatctatcaggccggcagcaccccttgcaatg |
| | | gcgtgaagggctttaactgctacttcccactgcagtcctacggcttccagccaacatacggcgtgggctaccagcctta |
| | | cagagtggtggtgctgagcttcgagctgctgcatgctcctgccacagtgtgcggccctaagaaaagcaccaatctcgtg |
| | | aagaacaaatgcgtgaacttcaacttcaacggcctgaccggcaccggcgtgctgacagagagcaacaagaagttcctgc |
| | | cattccagcagttcggccgggacattgccgataccacagatgctgtcagagatccccagacactggaaatcctggacat |
| | | caccccatgcagcttcggcggagtgtctgtgatcacccctggcaccaacaccagcaatcaggtggcagtgctgtaccag |
| | | ggcgtgaactgtacagaggtgccagtggccattcacgccgatcagctgacccctacttggcgggtgtactccacaggca |
| | | gcaatgtgttccagaccagagccggctgtctgatcggagccgagcacgtgaacaatagctacgagtgcgacatccccat |
| | | cggcgctggcatctgtgccagctatcagacccagacaaacagccccagacgggctagaagtgtggccagccagagcatc |
| | | attgcctacacaatgtctctgggcgtcgagaacagcgtggcctactccaacaactctatcgctatccccaccaatttca |
| | | ccatcagcgtgaccaccgagatcctgcctgtgtccatgaccaagaccagcgtggactgcaccatgtacatctgcggcga |
| | | ttccaccgagtgctccaacctgctgctgcagtacggcagcttctgcacccagctgaatagagccctgacagggatcgcc |
| | | gtggaacaggacaagaacacccaagaggtgttcgcccaagtgaagcaaatctacaagacccctcctatcaaggacttcg |
| | | gcggcttcaatttcagccagattctgcccgatcctagcaagcccagcaagcggagcttcatcgaggacctgctgttcaa |
| | | caaagtgacactggccgacgccggcttcatcaagcagtatggcgattgtctgggcgacattgcagcccgggatctgatt |
| | | tgcgcccagaagtttaacggactgaccgtgctgcctcctctgctgaccgatgagatgatcgcccagtacacatctgccc |
| | | tgctggccggcacaatcacaagcggctggacatttggagctggcgctgccctgcagatcccctttgctatgcagatggc |
| | | ctaccggttcaacggcatcggagtgacccagaatgtgctgtacgagaaccagaagctgatcgccaaccagttcaacagc |
| | | gccatcggcaagatccaggacagcctgagcagcacagccagcgctctgggaaagctgcaggacgtggtcaaccagaatg |
| | | cccaggcactgaacaccctggtcaagcagctgtctagcaacttcggcgccatcagctctgtgctgaacgatatcctgag |
| | | cagactggacaaggtggaagccgaggtgcagatcgacagactgatcaccggaaggctgcagtccctgcagacctacgtt |
| | | acccagcagctgatcagagccgccgagattagagcctctgccaatctggccgccaccaagatgtctgagtgtgtgctgg |
| | | gccagagcaagagagtggacttttgcggcaagggctaccacctgatgagcttccctcagtctgcaccacacggcgtggt |
| | | gtttctgcacgtgacatacgtgcccgctcaagagaagaacttcacaacagcccctgccatctgccacgacggcaaagcc |
| | | cactttcctagagaaggcgtgttcgtgtccaacggcacccattggttcgtgacccagcggaacttctacgagccccaga |
| | | tcatcaccaccgacaacaccttcgtgtctggcaactgcgacgtcgtgatcggcattgtgaacaataccgtgtacgaccc |
| | | tctgcagcccgagctggacagcttcaaagaggaactggataagtactttaagaaccacacaagccccgacgtggacctg |
| | | ggcgatatcagcggaatcaatgccagcgtcgtgaacatccagaaagagatcgaccggctgaacgaggtggccaagaatc |
| | | tgaacgagagcctgatcgacctgcaagaactggggaagtacgagcagtacatcaagtggccttggtactgcatgaccag |
| | | ctgctgtagctgcctgaagggctgttgcagctgtggctcctgctgcaagttcgacgaggacgattctgagcccgtgctg |
| | | aaaggcgtgaagctgcactacacagaattcacctgcctgctggccagcatggggctgcagctgaacctcacctatgaga |
| | | ggaaggacaacacgacggtgacaaggcttctcaacatcaaccccaacaagacctcggccagcgggagctgcggcgccca |
| | | cctggtgactctggagctgcacagcgagggcaccaccgtcctgctcttccagttcgggatgaatgcaagttctagccgg |
| | | tttttcctacaaggaatccagttgaatacaattcttcctgacgccagagaccctgcctttaaagctgccaacggctccc |
| | | tgcgagcgctgcaggccacagtcggcaattcctacaagtgcaacgcggaggagcacgtccgtgtcacgaaggcgttttc |
| | | agtcaatatattcaaagtgtgggtccaggctttcaaggtggaaggtggccagtttggctctgtggaggagtgtctgctg |
| | | gacgagaacagcatgctgatccccatcgctgtgggtggtgccctggcggggctggtcctcatcgtcctcatcgcctacc |
| | | tcgtcggcaggaagaggagtcacgcaggctaccagactatctagtaaagatctttttccctctgccaaaaattatgggg |
| | | acatcatgaagccccttgagcatctgacttctggctaataaaggaaatttattttcattgcaatagtgtgttggaattt |
| | | tttgtgtctctcactcggaaggacataagggcggccgcggtacccgtgaggctccggtgcccgtcagtgggcagagcgc |
| | | acatcgcccacagtccccgagaagttggggggaggggtcggcaattgaaccggtgcctagagaaggtggcgcggggtaa |
| | | actgggaaagtgatgtcgtgtactggctccgcctttttcccgagggtgggggagaaccgtatataagtgcagtagtcgc |
| | | cgtgaacgttctttttcgcaacgggtttgccgccagaacacagtctagaggatccgccgccaccatgctgccctttctc |
| | | tccatgcttgtcttgcttgtacagcccctgggaaatctgggagcagaaatgaagagcctctcgcagagatcagtaccca |
| | | acacctgcaccctagtcatgtgtagcccaacagagaatggcctgcctggtcgtgatggacgggatgggagagaaggtcc |
| | | acggggtgagaagggtgatccaggtttgccaggacctatggggctctcagggttgcagggccctacaggtccagttgga |
| | | cccaaaggagagaatggctctgctggcgaacctggaccaaagggagaacgtggactaagtggacctccaggacttccag |
| | | gtattcctggtccagctgggaaagaaggtccctctgggaagcaggggaacataggacctcaaggcaaaccaggtcctaa |
| | | aggagaggctgggcccaaaggagaagtaggtgctcctggcatgcaaggatctacaggggcaaaaggctccacaggcccc |
| | | aagggagaaagaggtgcccctggtgtgcaaggagccccagggaatgctggagcagcaggacctgccggacctgccggtc |
| | | cacagggagctccaggttccagggggcccccaggactcaagggggacagaggtgttcctggagacagaggaatcaaagg |
| | | tgaaagcgggcttccagacagtgctgctctgaggcagcagatggaggccttaaaaggaaaactacagcgtctagaggtt |
| | | gccttctcccactatcagaaagctgcattgttccctgatggccatagaagattggataaggtcgaagaggaagtaaacc |
| | | ttcatgaagattttgtattcataaaaaagctaaagagatgcaacaaaggagaaggatctttatccttgctgaactgtga |
| | | ggagatgagaaggcaatttgaagaccttgtcaaggatataacgttaaacaaagaagagaaaaaagaaaacagctttgaa |
| | | atgcaaagaggtgatgaggatcctcaaattgcagcacacgttgtaagcgaagccaacagtaatgcagcatccgttctac |
| | | agtgggccaagaaaggatattataccatgaaaagcaacttggtaatgcttgaaaatgggaaacagctgacggttaaaag |
| | | agaaggactctattatgtctacactcaagtcaccttctgctctaatcgggagccttcgagtcaacgcccattcatcgtc |
| | | ggcctctggctgaagcccagcagtggatctgagagaatcttactcaaggggcaaatacccacagttcctcccagcttt |
| | | gcgagcagcagtctgttcacttgggcggagtgtttgaattacaagctggtgcttctgtgtttgtcaacgtgactgaagc |
| | | aagccaagtgatccacagagttggcttctcatcttttggcttactcaaactc |
| SARS-CoV-2 B.1.351 | 231 | VNFTTRTQLPPAYTNSFTRGVYYPDKVFRSSVLHSTQDLFLPFFSNVTWFHAIHVSGTNGTKRFANPVLPFNDGVYFAS |
| SPIKE (South African | | TEKSNIIRGWIFGTTLDSKTQSLLIVNNATNVVIKVCEFQFCNDPFLGVYYHKNNKSWMESEFRVYSSANNCTFEYVSQ |
| Variant (Without SP and | | PFLMDLEGKQGNFKNLREFVFKNIDGYFKIYSKHTPINLVRGLPQGFSALEPLVDLPIGINITRFQTLHISYLTPGDSS |
| TM); Protein Sequence | | SGWTAGAAAYYVGYLQPRTFLLKYNENGTITDAVDCALDPLSETKCTLKSFTVEKGIYQTSNFRVQPTESIVRFPNITN |
| | | LCPFGEVFNATRFASVYAWNRKRISNCVADYSVLYNSASFSTFKCYGVSPTKLNDLCFTNVYADSFVIRGDEVRQIAPG |
| | | QTGNIADYNYKLPDDFTGCVIAWNSNNLDSKVGGNYNYLYRLFRKSNLKPFERDISTEIYQAGSTPCNGVKGFNCYFPL |
| | | QSYGFQPTYGVGYQPYRVVVLSFELLHAPATVCGPKKSTNLVKNKCVNFNFNGLTGTGVLTESNKKFLPFQQFGRDIAD |
| | | TTDAVRDPQTLEILDITPCSFGGVSVITPGTNTSNQVAVLYQGVNCTEVPVAIHADQLTPTWRVYSTGSNVFQTRAGCL |
| | | IGAEHVNNSYECDIPIGAGICASYQTQTNSPRRARSVASQSIIAYTMSLGVENSVAYSNNSIAIPTNFTISVTTEILPV |
| | | SMTKTSVDCTMYICGDSTECSNLLLQYGSFCTQLNRALTGIAVEQDKNTQEVFAQVKQIYKTPPIKDFGGFNFSQILPD |
| | | PSKPSKRSFIEDLLFNKVTLADAGFIKQYGDCLGDIAARDLICAQKFNGLTVLPPLLTDEMIAQYTSALLAGTITSGWT |
| | | FGAGAALQIPFAMQMAYRFNGIGVTQNVLYENQKLIANQFNSAIGKIQDSLSSTASALGKLQDVVNQNAQALNTLVKQL |
| | | SSNFGAISSVLNDILSRLDKVEAEVQIDRLITGRLQSLQTYVTQQLIRAAEIRASANLAATKMSECVLGQSKRVDFCGK |
| | | GYHLMSFPQSAPHGVVFLHVTYVPAQEKNFTTAPAICHDGKAHFPREGVFVSNGTHWFVTQRNFYEPQIITTDNTFVSG |
| | | NCDVVIGIVNNTVYDPLQPELDSFKEELDKYFKNHTSPDVDLGDISGINASVVNIQKEIDRLNEVAKNLNESLIDLQEL |
| | | GKYEQYIKWPWYCMTSCCSCLKGCCSCGSCCKFDEDDSEPVLKGVKLHYT |
| SARS-CoV-2 B.1.351 | 232 | gtgaactttaccacccgcacccagctgccgccggcgtataccaacagctttacccgcggcgtgtattatccggataaag |
| SPIKE (South African | | tgtttcgcagcagcgtgctgcatagcacccaggatctgtttctgccgttttttagcaacgtgacctggtttcatgcgat |
| Variant (Without SP and | | tcatgtgagcggcaccaacggcaccaaacgctttgcgaacccggtgctgccgtttaacgatggcgtgtattttgcgagc |
| TM); DNA Sequence | | accgaaaaaagcaacattattcgcggctggatttttggcaccaccctggatagcaaaacccagagcctgctgattgtga |
| | | acaacgcgaccaacgtggtgattaaagtgtgcgaatttcagttttgcaacgatccgtttctgggcgtgtattatcataa |
| | | aaacaacaaaagctggatggaaagcgaatttcgcgtgtatagcagcgcgaacaactgcacctttgaatatgtgagccag |
| | | ccgtttctgatggatctggaaggcaaacagggcaactttaaaaacctgcgcgaatttgtgtttaaaaacattgatggct |
| | | attttaaaatttatagcaaacataccccgattaacctggtgcgcggcctgccgcagggctttagcgcgctggaaccgct |
| | | ggtggatctgccgattggcattaacattacccgctttcagaccctgcatattagctatctgaccccgggcgatagcagc |
| | | agcggctggaccgcgggcgcggcggcgtattatgtgggctatctgcagccgcgcacctttctgctgaaatataacgaaa |
| | | acggcaccattaccgatgcggtggattgcgcgctggatccgctgagcgaaaccaaatgcaccctgaaaagctttaccgt |
| | | ggaaaaaggcatttatcagaccagcaactttcgcgtgcagccgaccgaaagcattgtgcgctttccgaacattaccaac |
| | | ctgtgcccgtttggcgaagtgtttaacgcgacccgctttgcgagcgtgtatgcgtggaaccgcaaacgcattagcaact |
| | | gcgtggcggattatagcgtgctgtataacagcgcgagctttagcacctttaaatgctatggcgtgagcccgaccaaact |
| | | gaacgatctgtgctttaccaacgtgtatgcggatagctttgtgattcgcggcgatgaagtgcgccagattgcgccgggc |
| | | cagaccggcaacattgcggattataactataaactgccggatgattttaccggctgcgtgattgcgtggaacagcaaca |
| | | acctggatagcaaagtgggcggcaactataactatctgtatcgcctgtttcgcaaaagcaacctgaaaccgtttgaacg |
| | | cgatattagcaccgaaatttatcaggcgggcagcaccccgtgcaacggcgtgaaaggctttaactgctattttccgctg |
| | | cagagctatggctttcagccgacctatggcgtgggctatcagccgtatcgcgtggtggtgctgagctttgaactgctgc |
| | | atgcgccggcgaccgtgtgcggcccgaaaaaaagcaccaacctggtgaaaaacaaatgcgtgaactttaactttaacgg |
| | | cctgaccggcaccggcgtgctgaccgaaagcaacaaaaaatttctgccgtttcagcagtttggccgcgatattgcggat |
| | | accaccgatgcggtgcgcgatccgcagaccctggaaattctggatattaccccgtgcagctttggcggcgtgagcgtga |
| | | ttaccccgggcaccaacaccagcaaccaggtggcggtgctgtatcagggcgtgaactgcaccgaagtgccggtggcgat |
| | | tcatgcggatcagctgaccccgacctggcgcgtgtatagcaccggcagcaacgtgtttcagacccgcgcgggctgcctg |
| | | attggcgcggaacatgtgaacaacagctatgaatgcgatattccgattggcgcgggcatttgcgcgagctatcagaccc |
| | | agaccaacagcccgcgccgcgcgcgcagcgtggcgagccagagcattattgcgtataccatgagcctgggcgtggaaaa |
| | | cagcgtggcgtatagcaacaacagcattgcgattccgaccaactttaccattagcgtgaccaccgaaattctgccggtg |
| | | agcatgaccaaaaccagcgtggattgcaccatgtatatttgcggcgatagcaccgaatgcagcaacctgctgctgcagt |
| | | atggcagcttttgcacccagctgaaccgcgcgctgaccggcattgcggtggaacaggataaaaacacccaggaagtgtt |
| | | tgcgcaggtgaaacagatttataaaaccccgccgattaaagattttggcggctttaactttagccagattctgccggat |
| | | ccgagcaaaccgagcaaacgcagctttattgaagatctgctgtttaacaaagtgaccctggcggatgcgggctttatta |
| | | aacagtatggcgattgcctgggcgatattgcggcgcgcgatctgatttgcgcgcagaaatttaacggcctgaccgtgct |
| | | gccgccgctgctgaccgatgaaatgattgcgcagtataccagcgcgctgctggcgggcaccattaccagcggctggacc |
| | | tttggcgcgggcgcggcgctgcagattccgtttgcgatgcagatggcgtatcgctttaacggcattggcgtgacccaga |
| | | acgtgctgtatgaaaaccagaaactgattgcgaaccagtttaacagcgcgattggcaaaattcaggatagcctgagcag |
| | | caccgcgagcgcgctgggcaaactgcaggatgtggtgaaccagaacgcgcaggcgctgaacaccctggtgaaacagctg |
| | | agcagcaactttggcgcgattagcagcgtgctgaacgatattctgagccgcctggataaagtggaagcggaagtgcaga |
| | | ttgatcgcctgattaccggccgcctgcagagcctgcagacctatgtgacccagcagctgattcgcgcggcggaaattcg |
| | | cgcgagcgcgaacctggcggcgaccaaaatgagcgaatgcgtgctgggccagagcaaacgcgtggatttttgcggcaaa |
| | | ggctatcatctgatgagctttccgcagagcgcgccgcatggcgtggtgtttctgcatgtgacctatgtgccggcgcagg |
| | | aaaaaaactttaccaccgcgccggcgatttgccatgatggcaaagcgcattttccgcgcgaaggcgtgtttgtgagcaa |
| | | cggcacccattggtttgtgacccagcgcaacttttatgaaccgcagattattaccaccgataacacctttgtgagcggc |
| | | aactgcgatgtggtgattggcattgtgaacaacaccgtgtatgatccgctgcagccggaactggatagctttaaagaag |
| | | aactggataaatattttaaaaaccataccagcccggatgtggatctgggcgatattagcggcattaacgcgagcgtggt |
| | | gaacattcagaaagaaattgatcgcctgaacgaagtggcgaaaaacctgaacgaaagcctgattgatctgcaggaactg |
| | | ggcaaatatgaacagtatattaaatggccgtggtattgcatgaccagctgctgcagctgcctgaaaggctgctgcagct |
| | | gcggcagctgctgcaaatttgatgaagatgatagcgaaccggtgctgaaaggcgtgaaactgcattatacc |
| SPD-xCD40L protein | 233 | MLPFLSMLVLLVQPLGNLGAEMKSLSQRSVPNTCTLVMCSPTENGLPGRDGRDGREGPRGEKGDPGLPGPMGLSGLQGP |
| sequence | | TGPVGPKGENGSAGEPGPKGERGLSGPPGLPGIPGPAGKEGPSGKQGNIGPQGKPGPKGEAGPKGEVGAPGMQGSTGAK |
| | | GSTGPKGERGAPGVQGAPGNAGAAGPAGPAGPQGAPGSRGPPGLKGDRGVPGDRGIKGESGLPDSAALRQQMEALKGKL |
| | | QRLEVAFSHYQKAALFPDGHRRLDKVEEEVNLHEDFVFIKKLKRCNKGEGSLSLLNCEEMRRQFEDLVKDITLNKEEKK |
| | | ENSFEMQRGDEDPQIAAHVVSEANSNAASVLQWAKKGYYTMKSNLVMLENGKQLTVKREGLYYVYTQVTFCSNREPSSQ |
| | | RPFIVGLWLKPSSGSERILLKAANTHSSSQLCEQQSVHLGGVFELQAGASVFVNVTEASQVIHRVGFSSFGLLKL |
| CD161-LAMP Protein | 234 | MAPRSARRPLLLLLLLLLLGLMHCASAAMFMVKNGNGTACIMANFSAAFSVNYDTKSGPKNMTLDLPSDATVVLNRSSC |
| Sequence | | GKENTSDPSLVIAFGRGHTLTLNFTRNATRYSVQLMSFVYNLSDTHLFPNASSKEIKTVESITDIRADIDKKYRCVSGT |
| | | QVHMNNVTVTLHDATIQAYLSNSSFSRGETRCEQDLEQKSSIEKCSVDIQQSRNKTTERPGLLNCPIYWQQLREKCLLF |
| | | SHTVNPWNNSLADCSTKESSLLLIRDKDELIHTQNLIRDKAILFWIGLNFSLSEKNWKWINGSFLNSNDLEIRGDAKEN |
| | | SCISISQTSVYSEYCSTEIRWICQKELTPVRNKVYPDSTCLLASMGLQLNLTYERKDNTTVTRLLNINPNKTSASGSCG |
| | | AHLVTLELHSEGTTVLLFQFGMNASSSRFFLQGIQLNTILPDARDPAFKAANGSLRALQATVGNSYKCNAEEHVRVTKA |
| | | FSVNIFKVWVQAFKVEGGQFGSVEECLLDENSM |
| CD161-LAMP-sCD40L; | 235 | atggcgccccgcagcgcccggcgacccctgctgctgctactgctgttgctgctgctcggcctcatgcattgtgcgtcag |
| CD161 (Extracellular | | cagcaatgtttatggtgaaaaatggcaacgggaccgcgtgcataatggccaacttctctgctgccttctcagtgaacta |
| Domain) +LAMP +EF- | | cgacaccaagagtggccctaagaacatgacccttgacctgccatcagatgccacagtggtgctcaaccgcagctcctgt |
| 1 alpha +SPD +sCD40L; | | ggaaaagagaacacttctgaccccagtctcgtgattgcttttggaagaggacatacactcactctcaatttcacgagaa |
| DNA Sequence | | atgcaacacgttacagcgtccagctcatgagttttgtttataacttgtcagacacacaccttttccccaatgcgagctc |
| | | caaagaaatcaagactgtggaatctataactgacatcagggcagatatagataaaaaatacagatgtgttagtggcacc |
| | | caggtccacatgaacaacgtgaccgtaacgctccatgatgccaccatccaggcgtacctttccaacagcagcttcagcc |
| | | ggggagagacacgctgtgaacaagacctcgagcagaagtccagcatcgagaagtgcagcgtggacatccagcagagccg |
| | | gaacaagaccaccgaaagacccggcctgctgaactgccctatctactggcagcagctgagagagaagtgcctgctgttc |
| | | agccacaccgtgaatccctggaacaacagcctggccgactgcagcacaaaagagagcagcctgctgctgatcagagaca |
| | | aggacgagctgatccacacacagaacctgatccgcgacaaggccatcctgttctggatcggcctgaacttcagcctgag |
| | | cgagaagaactggaagtggatcaacggcagcttcctgaactccaacgacctggaaatccggggcgacgccaaagagaac |
| | | agctgcatcagcatcagccagaccagcgtgtacagcgagtactgctccaccgagatcagatggatctgccagaaagaac |
| | | tgacccctgtgcggaacaaggtgtaccccgattctgaattcacctgcctgctggccagcatggggctgcagctgaacct |
| | | cacctatgagaggaaggacaacacgacggtgacaaggcttctcaacatcaaccccaacaagacctcggccagcgggagc |
| | | tgcggcgcccacctggtgactctggagctgcacagcgagggcaccaccgtcctgctcttccagttcgggatgaatgcaa |
| | | gttctagccggtttttcctacaaggaatccagttgaatacaattcttcctgacgccagagaccctgcctttaaagctgc |
| | | caacggctccctgcgagcgctgcaggccacagtcggcaattcctacaagtgcaacgcggaggagcacgtccgtgtcacg |
| | | aaggcgttttcagtcaatatattcaaagtgtgggtccaggctttcaaggtggaaggtggccagtttggctctgtggagg |
| | | agtgtctgctggacgagaacagcatgctgatccccatcgctgtgggtggtgccctggcggggctggtcctcatcgtcct |
| | | catcgcctacctcgtcggcaggaagaggagtcacgcaggctaccagactatctagtaaagatctttttccctctgccaa |
| | | aaattatggggacatcatgaagccccttgagcatctgacttctggctaataaaggaaatttattttcattgcaatagtg |
| | | tgttggaattttttgtgtctctcactcggaaggacataagggcggccgcggtacccgtgaggctccggtgcccgtcagt |
| | | gggcagagcgcacatcgcccacagtccccgagaagttggggggaggggtcggcaattgaaccggtgcctagagaaggtg |
| | | gcgcggggtaaactgggaaagtgatgtcgtgtactggctccgcctttttcccgagggtgggggagaaccgtatataagt |
| | | gcagtagtcgccgtgaacgttctttttcgcaacgggtttgccgccagaacacagtctagaggatccgccgccaccatgg |
| | | aaaccgatacactgctgctgtgggtgctgttgctctgggttccaggatctacaggcgacatgctgccctttctctccat |
| | | gcttgtcttgcttgtacagcccctgggaaatctgggagcagaaatgaagagcctctcgcagagatcagtacccaacacc |
| | | tgcaccctagtcatgtgtagcccaacagagaatggcctgcctggtcgtgatggacgggatgggagagaaggtccacggg |
| | | gtgagaagggtgatccaggtttgccaggacctatggggctctcagggttgcagggccctacaggtccagttggacccaa |
| | | aggagagaatggctctgctggcgaacctggaccaaagggagaacgtggactaagtggacctccaggacttccaggtatt |
| | | cctggtccagctgggaaagaaggtccctctgggaagcaggggaacataggacctcaaggcaaaccaggtcctaaaggag |
| | | aggctgggcccaaaggagaagtaggtgctcctggcatgcaaggatctacaggggcaaaaggctccacaggccccaaggg |
| | | agaaagaggtgcccctggtgtgcaaggagccccagggaatgctggagcagcaggacctgccggacctgccggtccacag |
| | | ggagctccaggttccagggggcccccaggactcaagggggacagaggtgttcctggagacagaggaatcaaaggtgaaa |
| | | gcgggcttccagacagtgctgctctgaggcagcagatggaggccttaaaaggaaaactacagcgtctagaggttgcctt |
| | | ctcccactatcagaaagctgcattgttccctgatggccatagaagattggataaggtcgaagaggaagtaaaccttcat |
| | | gaagattttgtattcataaaaaagctaaagagatgcaacaaaggagaaggatctttatccttgctgaactgtgaggaga |
| | | tgagaaggcaatttgaagaccttgtcaaggatataacgttaaacaaagaagagaaaaaagaaaacagctttgaaatgca |
| | | aagaggtgatgaggatcctcaaattgcagcacacgttgtaagcgaagccaacagtaatgcagcatccgttctacagtgg |
| | | gccaagaaaggatattataccatgaaaagcaacttggtaatgcttgaaaatgggaaacagctgacggttaaaagagaag |
| | | gactctattatgtctacactcaagtcaccttctgctctaatcgggagccttcgagtcaacgcccattcatcgtcggcct |
| | | ctggctgaagcccagcagtggatctgagagaatcttactcaaggcggcaaatacccacagttcctcccagctttgcgag |
| | | cagcagtctgttcacttgggcggagtgtttgaattacaagctggtgcttctgtgtttgtcaacgtgactgaagcaagcc |
| | | aagtgatccacagagttggcttctcatcttttggcttactcaaactc |
| CD161 (Extracellular | 236 | QKSSIEKCSVDIQQSRNKTTERPGLLNCPIYWQQLREKCLLFSHTVNPWNNSLADCSTKESSLLLIRDKDELIHTQNLI |
| Domain) Protein Sequence | | RDKAILFWIGLNFSLSEKNWKWINGSFLNSNDLEIRGDAKENSCISISQTSVYSEYCSTEIRWICQKELTPVRNKVYPD |
| | | S |
| CD161 (Extracellular | 237 | cagaagtccagcatcgagaagtgcagcgtggacatccagcagagccggaacaagaccaccgaaagacccggcctgctga |
| Domain) DNA Sequence | | actgccctatctactggcagcagctgagagagaagtgcctgctgttcagccacaccgtgaatccctggaacaacagcct |
| | | ggccgactgcagcacaaaagagagcagcctgctgctgatcagagacaaggacgagctgatccacacacagaacctgatc |
| | | cgcgacaaggccatcctgttctggatcggcctgaacttcagcctgagcgagaagaactggaagtggatcaacggcagct |
| | | tcctgaactccaacgacctggaaatccggggcgacgccaaagagaacagctgcatcagcatcagccagaccagcgtgta |
| | | cagcgagtactgctccaccgagatcagatggatctgccagaaagaactgacccctgtgcggaacaaggtgtaccccgat |
| | | tct |
| SPD-sCD40L protein | 238 | MLPFLSMLVLLVQPLGNLGAEMKSLSQRSVPNTCTLVMCSPTENGLPGRDGRDGREGPRGEKGDPGLPGPMGLSGLQGP |
| sequence | | TGPVGPKGENGSAGEPGPKGERGLSGPPGLPGIPGPAGKEGPSGKQGNIGPQGKPGPKGEAGPKGEVGAPGMQGSTGAK |
| | | GSTGPKGERGAPGVQGAPGNAGAAGPAGPAGPQGAPGSRGPPGLKGDRGVPGDRGIKGESGLPDSAALRQQMEALKGKL |
| | | QRLEVAFSHYQKAALFPDGHRRLDKVEEEVNLHEDFVFIKKLKRCNKGEGSLSLLNCEEMRRQFEDLVKDITLNKEEKK |
| | | ENSFEMQRGDEDPQIAAHVVSEANSNAASVLQWAKKGYYTMKSNLVMLENGKQLTVKREGLYYVYTQVTFCSNREPSSQ |
| | | RPFIVGLWLKPSSGSERILLKAANTHSSSQLCEQQSVHLGGVFELQAGASVFVNVTEASQVIHRVGFSSFGLLKL |
| SPD-sCD40L DNA | 239 | atgctgccctttctctccatgcttgtcttgcttgtacagcccctgggaaatctgggagcagaaatgaagagcctctcgc |
| sequence | | agagatcagtacccaacacctgcaccctagtcatgtgtagcccaacagagaatggcctgcctggtcgtgatggacggga |
| | | tgggagagaaggtccacggggtgagaagggtgatccaggtttgccaggacctatggggctctcagggttgcagggccct |
| | | acaggtccagttggacccaaaggagagaatggctctgctggcgaacctggaccaaagggagaacgtggactaagtggac |
| | | ctccaggacttccaggtattcctggtccagctgggaaagaaggtccctctgggaagcaggggaacataggacctcaagg |
| | | caaaccaggtcctaaaggagaggctgggcccaaaggagaagtaggtgctcctggcatgcaaggatctacaggggcaaaa |
| | | ggctccacaggccccaagggagaaagaggtgcccctggtgtgcaaggagccccagggaatgctggagcagcaggacctg |
| | | ccggacctgccggtccacagggagctccaggttccagggggcccccaggactcaagggggacagaggtgttcctggaga |
| | | cagaggaatcaaaggtgaaagcgggcttccagacagtgctgctctgaggcagcagatggaggccttaaaaggaaaacta |
| | | cagcgtctagaggttgccttctcccactatcagaaagctgcattgttccctgatggccatagaagattggataaggtcg |
| | | aagaggaagtaaaccttcatgaagattttgtattcataaaaaagctaaagagatgcaacaaaggagaaggatctttatc |
| | | cttgctgaactgtgaggagatgagaaggcaatttgaagaccttgtcaaggatataacgttaaacaaagaagagaaaaaa |
| | | gaaaacagctttgaaatgcaaagaggtgatgaggatcctcaaattgcagcacacgttgtaagcgaagccaacagtaatg |
| | | cagcatccgttctacagtgggccaagaaaggatattataccatgaaaagcaacttggtaatgcttgaaaatgggaaaca |
| | | gctgacggttaaaagagaaggactctattatgtctacactcaagtcaccttctgctctaatcgggagccttcgagtcaa |
| | | cgcccattcatcgtcggcctctggctgaagcccagcagtggatctgagagaatcttactcaaggcggcaaatacccaca |
| | | gttcctcccagctttgcgagcagcagtctgttcacttgggcggagtgtttgaattacaagctggtgcttctgtgtttgt |
| | | caacgtgactgaagcaagccaagtgatccacagagttggcttctcatcttttggcttactcaaactctga |
| | 240 | |
| HER2-LAMP-OX40L; | 241 | atggcgccccgcagcgcccggcgacccctgctgctgctactgctgttgctgctgctcggcctcatgcattgtgcgtcag |
| HER2 (Extracellular | | cagcaatgtttatggtgaaaaatggcaacgggaccgcgtgcataatggccaacttctctgctgccttctcagtgaacta |
| Domain) +LAMP +EF- | | cgacaccaagagtggccctaagaacatgacccttgacctgccatcagatgccacagtggtgctcaaccgcagctcctgt |
| 1alpha +IL-2 SP +OX40L | | ggaaaagagaacacttctgaccccagtctcgtgattgcttttggaagaggacatacactcactctcaatttcacgagaa |
| (Extracellular Domain +Fc | | atgcaacacgttacagcgtccagctcatgagttttgtttataacttgtcagacacacaccttttccccaatgcgagctc |
| Domain); DNA Sequence | | caaagaaatcaagactgtggaatctataactgacatcagggcagatatagataaaaaatacagatgtgttagtggcacc |
| | | caggtccacatgaacaacgtgaccgtaacgctccatgatgccaccatccaggcgtacctttccaacagcagcttcagcc |
| | | ggggagagacacgctgtgaacaagacctcgagacacaagtctgcaccggcaccgacatgaagctgagactgcccgccag |
| | | ccccgaaacccatctggacatgctgcggcatctgtaccaaggctgtcaagtggtgcaaggcaatctggaactgacatat |
| | | ctgcctaccaacgcctctctgagctttctgcaagacatccaagaagtgcaaggctacgtcctcattgcccacaaccaag |
| | | tccgacaagtgccactgcagcggctgagaatcgtgcggggcacccagctgttcgaggacaactatgctctggccgtgct |
| | | ggacaacggcgaccctctgaacaacaccacaccagtgactggcgcctctcccggcggactgagagaactgcagctgcgc |
| | | tctctgaccgagattctgaagggcggcgtgctgatccagcggaaccctcagctgtgctaccaagacaccattctgtgga |
| | | aggacatcttccacaagaacaaccagctggctctgaccctcatcgacaccaacagaagccgggcttgccacccttgcag |
| | | ccccatgtgcaagggcagcagatgttggggcgagagcagcgaggactgccagtctctgaccagaaccgtgtgtgccggc |
| | | ggatgcgccagatgcaagggccctctgccaaccgattgctgccacgaacagtgcgccgctggctgtaccggccccaagc |
| | | acagcgattgtctggcttgtctgcacttcaaccactccggcatctgcgagctgcactgcccagccctcgtgacatacaa |
| | | caccgacacattcgagagcatgcccaaccccgagggcagatacacattcggcgccagctgtgtgaccgcttgcccctac |
| | | aactatctgagcaccgacgtgggcagctgcaccctcgtgtgccctctgcacaatcaagaagtgaccgccgaggacggca |
| | | cccagagatgcgagaagtgctccaagccttgcgccagagtgtgctacggactgggcatggaacatctgcgggaagtgcg |
| | | ggccgtgaccagcgccaatatccaagaatttgccggctgcaagaagattttcggcagtctggcctttctgcccgagagc |
| | | ttcgatggcgaccccgcctctaacacagcccctctgcagccagagcagctccaagtgttcgagacactggaagagatca |
| | | ccggctatctgtacatcagcgcttggcccgactctctgcccgatctgagcgtgttccagaatctgcaagtcatcagagg |
| | | ccggattctgcacaacggcgcctattctctgacactgcaaggactgggaatcagctggctgggactgcggagtctgaga |
| | | gagctgggcagcggactggcactgatccaccacaacacccatctgtgcttcgtgcacaccgtgccttgggatcagctgt |
| | | tccggaatccccaccaagctctgctgcacaccgccaacagacccgaggatgagtgtgtgggcgaggggctggcttgcca |
| | | tcagctctgtgccagaggacactgttggggacccggccctacccagtgcgtgaactgctcccagtttctgcggggccaa |
| | | gaatgcgtggaagagtgcagagtgctccaaggactgccccgcgagtacgtgaacgccagacactgtctgccatgccacc |
| | | ccgagtgccagcctcagaatggcagcgtgacatgcttcggccccgaggccgatcagtgtgtggcttgcgctcactacaa |
| | | ggaccctcccttctgcgtggcccggtgtccttctggcgtgaaacccgatctgtcctacatgcctatctggaagttcccc |
| | | gacgaggaaggcgcttgtcagccttgccccatcaactgcacccacgaattcacctgcctgctggccagcatggggctgc |
| | | agctgaacctcacctatgagaggaaggacaacacgacggtgacaaggcttctcaacatcaaccccaacaagacctcggc |
| | | cagcgggagctgcggcgcccacctggtgactctggagctgcacagcgagggcaccaccgtcctgctcttccagttcggg |
| | | atgaatgcaagttctagccggtttttcctacaaggaatccagttgaatacaattcttcctgacgccagagaccctgcct |
| | | ttaaagctgccaacggctccctgcgagcgctgcaggccacagtcggcaattcctacaagtgcaacgcggaggagcacgt |
| | | ccgtgtcacgaaggcgttttcagtcaatatattcaaagtgtgggtccaggctttcaaggtggaaggtggccagtttggc |
| | | tctgtggaggagtgtctgctggacgagaacagcatgctgatccccatcgctgtgggtggtgccctggcggggctggtcc |
| | | tcatcgtcctcatcgcctacctcgtcggcaggaagaggagtcacgcaggctaccagactatctagtaaagatctttttc |
| | | cctctgccaaaaattatggggacatcatgaagccccttgagcatctgacttctggctaataaaggaaatttattttcat |
| | | tgcaatagtgtgttggaattttttgtgtctctcactcggaaggacataagggcggccgcggtacccgtgaggctccggt |
| | | gcccgtcagtgggcagagcgcacatcgcccacagtccccgagaagttggggggaggggtcggcaattgaaccggtgcct |
| | | agagaaggtggcgcggggtaaactgggaaagtgatgtcgtgtactggctccgcctttttcccgagggtgggggagaacc |
| | | gtatataagtgcagtagtcgccgtgaacgttctttttcgcaacgggtttgccgccagaacacagtctagaggatccgcc |
| | | gccaccatgtacaggatgcaactcctgtcttgcattgcactaagtcttgcacttgtcacgaattcgataagcagcagcc |
| | | ctgccaaggaccctcctattcagaggctgaggggcgccgtgacaaggtgcgaggacggacagctgttcatcagcagcta |
| | | caagaacgagtatcagaccatggaggtgcagaacaacagcgtggtgatcaagtgcgacggcctgtacatcatctacctg |
| | | aagggcagcttcttccaagaggtgaagatcgacctgcactttagggaggaccacaaccctatcagcatccctatgctga |
| | | acgacggaaggaggatcgtgttcaccgtggtggctagcctggccttcaaggacaaggtgtacctgaccgtgaacgcccc |
| | | tgacaccctgtgcgagcacctgcagatcaacgacggcgagctgatcgtggtgcagctgacccctggctactgcgcccct |
| | | gagggcagctaccacagcaccgtgaaccaagtgcctctggatatcggaggcggaggaagcggaggcggaggaagcccca |
| | | gagggcccacaatcaagccctgtcctccatgcaaatgcccagcacctaacctcgagggtggaccatccgtcttcatctt |
| | | ccctccaaagatcaaggatgtactcatgatctccctgagccccatagtcacatgtgtggtggtggatgtgagcgaggat |
| | | gacccagatgtccagatcagctggtttgtgaacaacgtggaagtacacacagctcagacacaaacccatagagaggatt |
| | | acaacagtactctccgggtggtcagtgccctccccatccagcaccaggactggatgagtggcaaggcgttcgcatgcgc |
| | | ggtcaacaacaaagacctcccagcgcccatcgagagaaccatctcaaaacccaaagggtcagtaagagctccacaggta |
| | | tatgtcttgcctccaccagaagaagagatgactaagaaacaggtcactctgacctgcatggtcacagacttcatgcctg |
| | | aagacatttacgtggagtggaccaacaacgggaaaacagagctaaactacaagaacactgaaccagtcctggactctga |
| | | tggttcttacttcatgtacagcaagctgagagtggaaaagaagaactgggtggaaagaaatagctactcctgttcagtg |
| | | gtccacgagggtctgcacaatcaccacacgactaagagcttctcccggactccgggtaaa |
| IL-2 SP-OX40L extracellular | 242 | MYRMQLLSCIALSLALVINSSSSPAKDPPIQRLRGAVTRCEDGQLFISSYKNEYQTMEVQNNSVVIKCDGLYIIYLKGS |
| domain-Fc protein | | FFQEVKIDLHFREDHNPISIPMLNDGRRIVFTVVASLAFKDKVYLTVNAPDTLCEHLQINDGELIVVQLTPGYCAPEGS |
| sequence | | YHSTVNQVPLDIGGGGSGGGGSPRGPTIKPCPPCKCPAPNLEGGPSVFIFPPKIKDVLMISLSPIVTCVVVDVSEDDPD |
| | | VQISWFVNNVEVHTAQTQTHREDYNSTLRVVSALPIQHQDWMSGKAFACAVNNKDLPAPIERTISKPKGSVRAPQVYVL |
| | | PPPEEEMTKKQVTLTCMVTDFMPEDIYVEWTNNGKTELNYKNTEPVLDSDGSYFMYSKLRVEKKNWVERNSYSCSVVHE |
| | | GLHNHHTTKSFSRTPGK |
| OX40L (Extracellular | 243 | SSSPAKDPPIQRLRGAVTRCEDGQLFISSYKNEYQTMEVQNNSVVIKCDGLYIIYLKGSFFQEVKIDLHFREDHNPISI |
| Domain + Fc Domain) | | PMLNDGRRIVFTVVASLAFKDKVYLTVNAPDTLCEHLQINDGELIVVQLTPGYCAPEGSYHSTVNQVPLDIGGGGSGGG |
| Protein Sequence | | GSPRGPTIKPCPPCKCPAPNLEGGPSVFIFPPKIKDVLMISLSPIVTCVVVDVSEDDPDVQISWFVNNVEVHTAQTQTH |
| | | REDYNSTLRVVSALPIQHQDWMSGKAFACAVNNKDLPAPIERTISKPKGSVRAPQVYVLPPPEEEMTKKQVTLTCMVTD |
| | | FMPEDIYVEWTNNGKTELNYKNTEPVLDSDGSYFMYSKLRVEKKNWVERNSYSCSVVHEGLHNHHTTKSFSRTPGK |
| OX40L (Extracellular | 244 | agcagcagccctgccaaggaccctcctattcagaggctgaggggcgccgtgacaaggtgcgaggacggacagctgttca |
| Domain + Fc Domain) DNA | | tcagcagctacaagaacgagtatcagaccatggaggtgcagaacaacagcgtggtgatcaagtgcgacggcctgtacat |
| Sequence | | catctacctgaagggcagcttcttccaagaggtgaagatcgacctgcactttagggaggaccacaaccctatcagcatc |
| | | cctatgctgaacgacggaaggaggatcgtgttcaccgtggtggctagcctggccttcaaggacaaggtgtacctgaccg |
| | | tgaacgcccctgacaccctgtgcgagcacctgcagatcaacgacggcgagctgatcgtggtgcagctgacccctggcta |
| | | ctgcgcccctgagggcagctaccacagcaccgtgaaccaagtgcctctggatatcggaggcggaggaagcggaggcgga |
| | | ggaagccccagagggcccacaatcaagccctgtcctccatgcaaatgcccagcacctaacctcgagggtggaccatccg |
| | | tcttcatcttccctccaaagatcaaggatgtactcatgatctccctgagccccatagtcacatgtgtggtggtggatgt |
| | | gagcgaggatgacccagatgtccagatcagctggtttgtgaacaacgtggaagtacacacagctcagacacaaacccat |
| | | agagaggattacaacagtactctccgggtggtcagtgccctccccatccagcaccaggactggatgagtggcaaggcgt |
| | | tcgcatgcgcggtcaacaacaaagacctcccagcgcccatcgagagaaccatctcaaaacccaaagggtcagtaagagc |
| | | tccacaggtatatgtcttgcctccaccagaagaagagatgactaagaaacaggtcactctgacctgcatggtcacagac |
| | | ttcatgcctgaagacatttacgtggagtggaccaacaacgggaaaacagagctaaactacaagaacactgaaccagtcc |
| | | tggactctgatggttcttacttcatgtacagcaagctgagagtggaaaagaagaactgggtggaaagaaatagctactc |
| | | ctgttcagtggtccacgagggtctgcacaatcaccacacgactaagagcttctcccggactccgggtaaa |
| EF-1alpha core promoter | 245 | gggcagagcgcacatcgcccacagtccccgagaagttggggggaggggtcggcaattgaaccggtgcctagagaaggtg |
| | | gcgcggggtaaactgggaaagtgatgtcgtgtactggctccgcctttttcccgagggtgggggagaaccgtatataagt |
| | | gcagtagtcgccgtgaacgttctttttcgcaacgggtttgccgccagaacacag |
| Murine IL-2 signal peptide | 246 | MYRMQLLSCIALSLALVINS |
| (SP) amino acid sequence | | |
| Murine IL-2 SP nucleotide | 247 | atgtacaggatgcaactcctgtcttgcattgcactaagtcttgcacttgtcacgaattcg |
| sequence | | |
| Human IL-2 SP amino acid | 248 | MYRMQLLSCIALSLALVINS |
| sequence | | |
| Human IL-2 SP nucleotide | 249 | atgtacaggatgcaactcctgtcttgcattgcactaagtcttgcacttgtcacaaacagt |
| sequence | | |
| | 250 | |
| HER2-LAMP-CD80; HER2 | 251 | atggcgccccgcagcgcccggcgacccctgctgctgctactgctgttgctgctgctcggcctcatgcattgtgcgtcag |
| (Extracellular Domain) | | cagcaatgtttatggtgaaaaatggcaacgggaccgcgtgcataatggccaacttctctgctgccttctcagtgaacta |
| +LAMP +EF-1alpha +IL-2 | | cgacaccaagagtggccctaagaacatgacccttgacctgccatcagatgccacagtggtgctcaaccgcagctcctgt |
| SP +CD80 (Extracellular | | ggaaaagagaacacttctgaccccagtctcgtgattgcttttggaagaggacatacactcactctcaatttcacgagaa |
| Domain +Fc Domain); DNA | | atgcaacacgttacagcgtccagctcatgagttttgtttataacttgtcagacacacaccttttccccaatgcgagctc |
| Sequence | | caaagaaatcaagactgtggaatctataactgacatcagggcagatatagataaaaaatacagatgtgttagtggcacc |
| | | caggtccacatgaacaacgtgaccgtaacgctccatgatgccaccatccaggcgtacctttccaacagcagcttcagcc |
| | | ggggagagacacgctgtgaacaagacctcgagacacaagtctgcaccggcaccgacatgaagctgagactgcccgccag |
| | | ccccgaaacccatctggacatgctgcggcatctgtaccaaggctgtcaagtggtgcaaggcaatctggaactgacatat |
| | | ctgcctaccaacgcctctctgagctttctgcaagacatccaagaagtgcaaggctacgtcctcattgcccacaaccaag |
| | | tccgacaagtgccactgcagcggctgagaatcgtgcggggcacccagctgttcgaggacaactatgctctggccgtgct |
| | | ggacaacggcgaccctctgaacaacaccacaccagtgactggcgcctctcccggcggactgagagaactgcagctgcgc |
| | | tctctgaccgagattctgaagggcggcgtgctgatccagcggaaccctcagctgtgctaccaagacaccattctgtgga |
| | | aggacatcttccacaagaacaaccagctggctctgaccctcatcgacaccaacagaagccgggcttgccacccttgcag |
| | | ccccatgtgcaagggcagcagatgttggggcgagagcagcgaggactgccagtctctgaccagaaccgtgtgtgccggc |
| | | ggatgcgccagatgcaagggccctctgccaaccgattgctgccacgaacagtgcgccgctggctgtaccggccccaagc |
| | | acagcgattgtctggcttgtctgcacttcaaccactccggcatctgcgagctgcactgcccagccctcgtgacatacaa |
| | | caccgacacattcgagagcatgcccaaccccgagggcagatacacattcggcgccagctgtgtgaccgcttgcccctac |
| | | aactatctgagcaccgacgtgggcagctgcaccctcgtgtgccctctgcacaatcaagaagtgaccgccgaggacggca |
| | | cccagagatgcgagaagtgctccaagccttgcgccagagtgtgctacggactgggcatggaacatctgcgggaagtgcg |
| | | ggccgtgaccagcgccaatatccaagaatttgccggctgcaagaagattttcggcagtctggcctttctgcccgagagc |
| | | ttcgatggcgaccccgcctctaacacagcccctctgcagccagagcagctccaagtgttcgagacactggaagagatca |
| | | ccggctatctgtacatcagcgcttggcccgactctctgcccgatctgagcgtgttccagaatctgcaagtcatcagagg |
| | | ccggattctgcacaacggcgcctattctctgacactgcaaggactgggaatcagctggctgggactgcggagtctgaga |
| | | gagctgggcagcggactggcactgatccaccacaacacccatctgtgcttcgtgcacaccgtgccttgggatcagctgt |
| | | tccggaatccccaccaagctctgctgcacaccgccaacagacccgaggatgagtgtgtgggcgaggggctggcttgcca |
| | | tcagctctgtgccagaggacactgttggggacccggccctacccagtgcgtgaactgctcccagtttctgcggggccaa |
| | | gaatgcgtggaagagtgcagagtgctccaaggactgccccgcgagtacgtgaacgccagacactgtctgccatgccacc |
| | | ccgagtgccagcctcagaatggcagcgtgacatgcttcggccccgaggccgatcagtgtgtggcttgcgctcactacaa |
| | | ggaccctcccttctgcgtggcccggtgtccttctggcgtgaaacccgatctgtcctacatgcctatctggaagttcccc |
| | | gacgaggaaggcgcttgtcagccttgccccatcaactgcacccacgaattcacctgcctgctggccagcatggggctgc |
| | | agctgaacctcacctatgagaggaaggacaacacgacggtgacaaggcttctcaacatcaaccccaacaagacctcggc |
| | | cagcgggagctgcggcgcccacctggtgactctggagctgcacagcgagggcaccaccgtcctgctcttccagttcggg |
| | | atgaatgcaagttctagccggtttttcctacaaggaatccagttgaatacaattcttcctgacgccagagaccctgcct |
| | | ttaaagctgccaacggctccctgcgagcgctgcaggccacagtcggcaattcctacaagtgcaacgcggaggagcacgt |
| | | ccgtgtcacgaaggcgttttcagtcaatatattcaaagtgtgggtccaggctttcaaggtggaaggtggccagtttggc |
| | | tctgtggaggagtgtctgctggacgagaacagcatgctgatccccatcgctgtgggtggtgccctggcggggctggtcc |
| | | tcatcgtcctcatcgcctacctcgtcggcaggaagaggagtcacgcaggctaccagactatctagtaaagatctttttc |
| | | cctctgccaaaaattatggggacatcatgaagccccttgagcatctgacttctggctaataaaggaaatttattttcat |
| | | tgcaatagtgtgttggaattttttgtgtctctcactcggaaggacataagggcggccgcggtacccgtgaggctccggt |
| | | gcccgtcagtgggcagagcgcacatcgcccacagtccccgagaagttggggggaggggtcggcaattgaaccggtgcct |
| | | agagaaggtggcgcggggtaaactgggaaagtgatgtcgtgtactggctccgcctttttcccgagggtgggggagaacc |
| | | gtatataagtgcagtagtcgccgtgaacgttctttttcgcaacgggtttgccgccagaacacagtctagaggatccgcc |
| | | gccaccatgtacaggatgcaactcctgtcttgcattgcactaagtcttgcacttgtcacgaattcgatagtggacgagc |
| | | agctgagcaagagcgtgaaggacaaggtgctgctgccttgtaggtacaacagccctcacgaggacgagagcgaggatag |
| | | gatctactggcagaagcacgacaaggtagtgctgagtgtgatagccggcaagctgaaggtgtggcctgagtacaagaat |
| | | aggaccctgtacgacaacaccacctacagcctgatcatcctgggcctggtgctgagcgataggggtacctacagctgcg |
| | | tggtgcagaagaaggagaggggcacctacgaggtgaagcacctggccctggtgaagctgagcatcaaggccgacttcag |
| | | cacccctaacatcaccgagagcggcaaccctagcgccgacaccaagaggatcacctgcttcgctagcggcggcttccct |
| | | aagcctaggttcagctggctggagaacggaagggagctgcctggcataaacacgaccatatctcaagaccctgagagcg |
| | | agctgtacaccatcagctctcagctggacttcaacaccacccgcaatcacaccatcaagtgcctgatcaagtacggcga |
| | | cgcccacgtgagcgaggacttcacctgggagaagcctcctgaggaccctcctgacagcaagaacgatatcggaggcgga |
| | | ggaagcggaggcggaggaagccccagagggcccacaatcaagccctgtcctccatgcaaatgcccagcacctaacctcg |
| | | agggtggaccatccgtcttcatcttccctccaaagatcaaggatgtactcatgatctccctgagccccatagtcacatg |
| | | tgtggtggtggatgtgagcgaggatgacccagatgtccagatcagctggtttgtgaacaacgtggaagtacacacagct |
| | | cagacacaaacccatagagaggattacaacagtactctccgggtggtcagtgccctccccatccagcaccaggactgga |
| | | tgagtggcaaggcgttcgcatgcgcggtcaacaacaaagacctcccagcgcccatcgagagaaccatctcaaaacccaa |
| | | agggtcagtaagagctccacaggtatatgtcttgcctccaccagaagaagagatgactaagaaacaggtcactctgacc |
| | | tgcatggtcacagacttcatgcctgaagacatttacgtggagtggaccaacaacgggaaaacagagctaaactacaaga |
| | | acactgaaccagtcctggactctgatggttcttacttcatgtacagcaagctgagagtggaaaagaagaactgggtgga |
| | | aagaaatagctactcctgttcagtggtccacgagggtctgcacaatcaccacacgactaagagcttctcccggactccg |
| | | ggtaaa |
| IL-2 SP + CD80 extracellular | 252 | MYRMQLLSCIALSLALVTNSVDEQLSKSVKDKVLLPCRYNSPHEDESEDRIYWQKHDKVVLSVIAGKLKVWPEYKNRTL |
| domain + FC | | YDNTTYSLIILGLVLSDRGTYSCVVQKKERGTYEVKHLALVKLSIKADFSTPNITESGNPSADTKRITCFASGGFPKPR |
| | | FSWLENGRELPGINTTISQDPESELYTISSQLDFNTTRNHTIKCLIKYGDAHVSEDFTWEKPPEDPPDSKNDIGGGGSG |
| | | GGGSPRGPTIKPCPPCKCPAPNLEGGPSVFIFPPKIKDVLMISLSPIVTCVVVDVSEDDPDVQISWFVNNVEVHTAQTQ |
| | | THREDYNSTLRVVSALPIQHQDWMSGKAFACAVNNKDLPAPIERTISKPKGSVRAPQVYVLPPPEEEMTKKQVTLTCMV |
| | | TDFMPEDIYVEWTNNGKTELNYKNTEPVLDSDGSYFMYSKLRVEKKNWVERNSYSCSVVHEGLHNHHTTKSFSRTPGK |
| CD80 (Extracellular Domain | 253 | VDEQLSKSVKDKVLLPCRYNSPHEDESEDRIYWQKHDKVVLSVIAGKLKVWPEYKNRTLYDNTTYSLIILGLVLSDRGT |
| + Fc Domain) Protein | | YSCVVQKKERGTYEVKHLALVKLSIKADFSTPNITESGNPSADTKRITCFASGGFPKPRFSWLENGRELPGINTTISQD |
| Sequence | | PESELYTISSQLDFNTTRNHTIKCLIKYGDAHVSEDFTWEKPPEDPPDSKNDIGGGGSGGGGSPRGPTIKPCPPCKCPA |
| | | PNLEGGPSVFIFPPKIKDVLMISLSPIVTCVVVDVSEDDPDVQISWFVNNVEVHTAQTQTHREDYNSTLRVVSALPIQH |
| | | QDWMSGKAFACAVNNKDLPAPIERTISKPKGSVRAPQVYVLPPPEEEMTKKQVTLTCMVTDFMPEDIYVEWTNNGKTEL |
| | | NYKNTEPVLDSDGSYFMYSKLRVEKKNWVERNSYSCSVVHEGLHNHHTTKSFSRTPGK |
| CD80 (Extracellular Domain | 881 | gtggacgagcagctgagcaagagcgtgaaggacaaggtgctgctgccttgtaggtacaacagccctcacgaggacgaga |
| + Fc Domain) DNA | | gcgaggataggatctactggcagaagcacgacaaggtagtgctgagtgtgatagccggcaagctgaaggtgtggcctga |
| Sequence | | gtacaagaataggaccctgtacgacaacaccacctacagcctgatcatcctgggcctggtgctgagcgataggggtacc |
| | | tacagctgcgtggtgcagaagaaggagaggggcacctacgaggtgaagcacctggccctggtgaagctgagcatcaagg |
| | | ccgacttcagcacccctaacatcaccgagagcggcaaccctagcgccgacaccaagaggatcacctgcttcgctagcgg |
| | | cggcttccctaagcctaggttcagctggctggagaacggaagggagctgcctggcataaacacgaccatatctcaagac |
| | | cctgagagcgagctgtacaccatcagctctcagctggacttcaacaccacccgcaatcacaccatcaagtgcctgatca |
| | | agtacggcgacgcccacgtgagcgaggacttcacctgggagaagcctcctgaggaccctcctgacagcaagaacgatat |
| | | cggaggcggaggaagcggaggcggaggaagccccagagggcccacaatcaagccctgtcctccatgcaaatgcccagca |
| | | cctaacctcgagggtggaccatccgtcttcatcttccctccaaagatcaaggatgtactcatgatctccctgagcccca |
| | | tagtcacatgtgtggtggtggatgtgagcgaggatgacccagatgtccagatcagctggtttgtgaacaacgtggaagt |
| | | acacacagctcagacacaaacccatagagaggattacaacagtactctccgggtggtcagtgccctccccatccagcac |
| | | caggactggatgagtggcaaggcgttcgcatgcgcggtcaacaacaaagacctcccagcgcccatcgagagaaccatct |
| | | caaaacccaaagggtcagtaagagctccacaggtatatgtcttgcctccaccagaagaagagatgactaagaaacaggt |
| | | cactctgacctgcatggtcacagacttcatgcctgaagacatttacgtggagtggaccaacaacgggaaaacagagcta |
| | | aactacaagaacactgaaccagtcctggactctgatggttcttacttcatgtacagcaagctgagagtggaaaagaaga |
| | | actgggtggaaagaaatagctactcctgttcagtggtccacgagggtctgcacaatcaccacacgactaagagcttctc |
| | | ccggactccgggtaaa |
| Exemplary human LAMP1- | 879 | |
| Large T antigen fragment | | |
| sequence including LAMP1 | | |
| transmembrane and | | |
| cytoplasmic regions and | | |
| LAMP1 signal sequence | | |
| Exemplary human LAMP1- | 880 | |
| Large T antigen fragment | | |
| sequence including LAMP1 | | |
| signal sequence, and | | |
| excluding LAMP1 | | |
| transmembrane and | | |
| cytoplasmic regions | | |
| Complimentary sequence to | 882 | See FIG. 28C |
| ITI-COVID-19 Bicistronic | | |
| Vaccine (ITI-Bicistronic-S1- | | |
| LAMP-RBG pA-EF2-S2P | | |
| BHG pA; First Generation | | |
| COVID-19 Vaccine); DNA | | |
| Sequence (SEQ ID NO: 228) | | |

### Example 2. A Second Generation Bicistronic Covid Vaccine (2-V-Covid) Elicits T Cell and Antibody Responses in Mice

[0529] A major challenge for generating sufficient antigen-specific T cell and antibody responses is the low immunogenicity of DNA vaccines. To increase T cell response to the DNA vaccine, a new bicistronic DNA vaccine was designed. This Example discusses a second generation COVID-19 DNA vaccine, Spike-LAMP-sCD40L (2-V-Covid vaccine; SARS-COV-2 B.1.351 Spike (South Africa Variant, without SP and TM)+LAMP+EF-1alpha+SPD+sCD40L; SEQ ID NOS: 242-243), comprising (1) full-length SARS-COV-2 spike protein fused with LAMP, and (2) soluble CD40L (sCD40L), both of which were expressed separately. This bicistronic DNA vaccine was designed to induce local expression of sCD40L at relatively low levels, thereby providing a safe approach to using systemic recombinant CD40L or agonistic anti-CD40 antibodies (van Mierlo et al., 2002).

[0530] CD40 ligand (CD40L; CD154) enhances the adaptive immune responses by stimulating dendritic cells and B cells. DNA vaccines comprising the CD40L gene have been shown to enhance T-cell and antibody responses in vivo. (Not shown.) To produce a COVID vaccine with improved immunogenicity, a second generation vaccine was designed to express SARS-COV-2 full-length spike protein and soluble CD40L in two separate cassettes. Immunogenicity of this 2-V COVID vaccine was evaluated in BALB/c mice. After two immunizations, the new vaccine induced stronger spike-specific T-cell responses and higher levels of spike-specific antibody responses compared to the first generation COVID-19 DNA vaccine described in Example 1. The data discussed in the following Examples suggest that the new vaccine is more immunogenic and has the potential to improve protection against COVID 19 and future emerging infectious disease.

[0531] CD40L is a transmembrane protein expressed on the surface of activated T cells, particularly CD4 T cells. CD40L stimulates CD40-dependent activation of antigen-presenting cells (APCs), such as dendritic cells (DCs) and macrophages, as well as B cells for enhancing T cell and antibody responses (Grewal & Flavell, 1998; Schoenberger et al., 1998). Recombinant soluble CD40L or agonistic antibodies have been used in clinical and demonstrated promising results in various cancers (Beatty et al., 2011, 2017; Vonderheide et al., 2001). Consequently, these immunostimulatory functions of CD40L have made it a promising vaccine adjuvant against infectious disease and cancers. As discussed herein and in the Examples that follow, sCD40L enhanced spike-specific T cell and antibody responses. The data discussed herein support the use of bicistronic DNA vaccines against infectious disease.

### A. Materials and Methods

### 1. Vaccine Constructs

[0532] The ITI-COVID-19 bicistronic vaccine (ITI-Bicistronic-S1-LAMP-RBG pA-EF2-S2P BHG pA; first generation COVID-19 DNA vaccine, “ITI-bicistronic vaccine,”; shown in FIG. 28C, SEQ ID NO: 228) was previously constructed as described in Example 1 above.

[0533] The second generation Spike-LAMP-sCD40L construct “2-V COVID vaccine,” SEQ ID NO: 228) was also constructed according to methods described in Example 1 above. The 2-V COVID vaccine had two separate cassettes driven independently by CMV promoter and EF1 promoter. The first cassette expressed full-length spike gene of the SARS-COV-2 South Africa variant (B.1.351) infectious clone (SEQ ID NO: 227). The second cassette expressed soluble murine CD40L extracellular domain fused with mouse pulmonary surfactant associated protein D (SPD) protein (SEQ ID NO: 233).

[0534] The control vector (CV) used is the vector without any gene insertions.

### 2. Reagents

[0535] Antibodies for flow cytometry and enzyme-linked immunospot (ELISPOT) were purchased from Biolegend, SA-HRP and AEC kit were purchased from BD. Antibody to spike proteins, and recombinant spike (S1) (Cat #40591-V08H) and RBD (Cat #40592-V08B) proteins were purchased from Sino Biologics. Rabbit polyclonal anti-S1 antibody was purchased from Sino Biologics. Antibody titers were evaluated using HRP anti-mouse antibodies from Southern Biotech. Renilla Luciferase Reporter Assay was purchased from Promega (Cat #E2710). Epivax peptides were synthesized by GenScript.

[0536] The pre-make lentiviral particles for overexpression of human ACE2 were ordered from Gen Target Inc (Cat #LvP1310)

[0537] JPT PepMix™ SARS-COV-2 overlapping peptide pool was purchased from JPT (Cat #PM-WCPV-S). The peptide pool contained a total of 315 peptides (delivered in two subpools of 158 and 157 peptides) derived from a peptide scan (15mer segments with an 11 amino acid overlap) through Spike (UniProt: PODTC2).

[0538] The pseudotyped luciferase rSARS-Cov-2 Spike virus purchased from Creative Diagnostics (No: Cov-PS01, Lot. No.: CL-114A). it is based on SARS-Cov-2 Wuhan-Hu-1 with luciferase as a reporter.

### 3. Transient Transfections of Constructs

[0539] 293T cells were transiently transfected with control vector (CV) or bicistronic vaccine constructs using lipofectamine 2000 (Invitrogen). 48-hours post-transfection, the supernatant was collected, centrifuged, and filtered. The supernatant was analyzed for expression of soluble CD40L.

[0540] In some embodiments, 293T cells may be transduced with human ACE2. 293T-ACE2 cell line was made by transducing 293T cell with a lentivirus expressing human ACE2 (angiotensin I converting enzyme 2, NM_021804), the lentivirus was made by GeneTarget Inc, it contains a RFP and Blasticidin dual selection markers. After infection, 15 ug/ml of Blasticidin are used to isolate the single cell clone that expresses both RFP and ACEs. As shown in the expression of human ACE2 was detected by staining with anti-human ACE2 antibody (Sino Biological, rabbit Pab, Cat #: 10108-T60). The 293T-ACE3 clone 2 and clone 5 have higher expression of hACE2, the clone 5 was used for the neutralization test in this study.

### 4. Western Blot and Immunoprecipitation Methods

[0541] Biotinylated anti-CD40L antibody (Clone MR1 BioLegend Cat #106503) was bound to streptavidin-coated magnetic beads and used to isolate CD40L. The beads were loaded onto gel for Western blot imaging. The following antibodies were also used for Western blot: (1) primary anti-CD40L/CD154 antibody (Invitrogen PA5-78983) and secondary antibody of goat anti-rabbit IgG-HRP (Southern Biotech 4030-05).

### 5. Immunization and Serum Collection

[0542] Six-to eight-week old female BALB/c mice were bred and maintained at a licensed animal facility.

[0543] The immunization schedule for ITI-bicistronic vaccine and 2-V COVID vaccine is shown in Table 2. Mice were immunized with DNA vaccines by ID injection to the ear followed by electroporation. Blood samples were collected before immunization and 14 days after the 2nd immunization. At day 28, mice were sacrificed as scheduled and spleens and sera were collected for the measurement of T cells and antibodies responses.

TABLE 2
Immunization Schedule.

| | | Concentration | Dose | | # | Volume | Mice | | | | |
|---|---|---|---|---|---|---|---|---|---|---|---|
| Group | Treatment | (mg/mL) | (μg) | Route | Mice | (μL) | ID | Day 0 | Day 14 | Day 14 | Day 28 |
| A | Control | 3.3 | 20 | ID | 10 | 20 | 001-010 | 1^{st} | Terminated | 2^{nd} | Termination |
| | Vector | | | (ear) | | | | immunization | 5 mice in | immunization | for ELISA |
| | (CV) | | | | | | | | each group | | and |
| B | ITI- | 2.0 | 20 | ID | 10 | 20 | 011-020 | | for ELISA | | ELISPOT |
| | Bicistronic | | | (ear) | | | | | and | | |
| | Vaccine | | | | | | | | | | |
| C | Spike- | 2.0 | 20 | IM | 10 | 20 | 021-030 | | | | |
| | LAMP- | | | (ear) | | | | | | | |
| | sCD40L | | | | | | | | | | |
| | (2-V | | | | | | | | | | |
| | COVID | | | | | | | | | | |
| | vaccine) | | | | | | | | | | |

### 6. Evaluation of Antigen-Specific T Cell Response by ELISPOT

[0544] To assess antigen-specific T cell response in the vaccinated mice, splenocytes from vaccinated mice were evaluated for antigen-specific IFNγ by Enzyme-linked immunospot (ELISPOT). ELISPOT assays were performed as described herein. Briefly, splenocytes were plated at 3×10⁵ cells/well and co-cultured with 1 μg/ml of JPT overlapping spike peptides, 0.25 μg/mL of concavalin A, or medium alone in a total volume of 200 μl/well T cell media for 48 h at 37° C. in 5% CO₂. The plates were developed with 50 μl/well AEC development solution for up to 30 min. Color development was stopped by washing under running tap water. After air dried, colored spots were counted using an AID ELISPOT High-Resolution Reader System and AID ELISPOT Software version 3.5 (Autoimmun Diagnostika GmbH). Student T test was used to determine the significant difference between the cells transfected with ITI-bicistronic vaccine and 2-V COVID vaccine.

### 7. ELISA

[0545] The murine antibody response to vaccine was assessed by indirect ELISA. ELISA plates (MaxiSorp) were coated with 1 μg/ml recombinant SARS-Cov-2 spike S1, or RBD protein overnight and then blocked with 2% BSA in PBS. Serum samples were diluted (1:2) in PBS-T. Samples were detected with 1:6000 goat anti-mouse IgG-HRP (Southern Biotech, Birmingham, Al). Reaction was developed with SureBlue TMB Substrate and stopped with TMB Stop Solution from KPL (Gaithersburg, MD). Plates were read (OD450) by using Epoch ELISA reader (BioTek, Winooski, VT).

8. Sars-Cov-2 Pseudovirus Neutralization Test (pVNT)

[0546] In some embodiments, a SARS-COV-2 pseudovirus neutralization test was used. Pseudotyped Luciferase rSARS-COV-2 Spike was purchased from Creative Diagnostics Inc., this lentivirus-based SARS-COV-2 S pseudotyped virus is a replication-restricted, recombinant pseudotyped lentiviral particles containing SARS-COV-2 spike protein (based on Wuhan-Hu-1 Isolate). Because the infectivity of Pseudotyped Luciferase rSARS-COV-2 is restricted to a single round of replication, it encodes Renilla luciferase in their lentiviral vector genome. When its genome integrates after entry into cells, luciferase expression and activity is proportional to the number of cells that were transduced.

[0547] To determine pVNT, 20 μL of SARS-COV-2 spike pseudotyped virus (105 RLU) may be pre-incubated with twofold serial-diluted test serum samples (starting dilution of 1:10) in a final volume of 50 μL for 1 hour at 37° C., followed by adding 5×10⁴ HEK293T-ACE2 cells in a volume of 50 μL. At 48-72 hours post-infection, an equal volume of Renilla Luciferase substrate (Promega, Cat #2710) is added and the luminescence signal was measured using microplate reader (BioTek) with Gen5 software. Measurements may be done in duplicate for CV pooled serum samples and triplicate for group B pooled serum samples. The % of neutralization and the IC50 of pVNT are calculated as previously described (Le Bert et al., 2020).

### 9. Flow Cytometry and Intracellular Cytokine Staining (ICS)

[0548] Splenocytes were stimulated with spike peptides at concentration of 2 μg/mL for 6 hours. After 6 hours incubations, the cells were stained with Zombie aqua, followed by surface staining, fixation with Perm/fixation solution (BD Biosciences), and stained with intracellular antibody in 1× perm/wash buffer. Samples were analyzed on a CytoFlex flow cytometer (Beckman Coulter) and analyzed using Kaluza software (Beckman Coulter).

[0549] Cells were stained for intracellular cytokine for IFNγ, TNFα, and IL-2. CD4 T cells (effector memory CD4) were gated on CD3+CD4+CD8-CD44+CD62L− lymphocytes. CD8 T cells (effector memory CD4) were gated on CD3+CD4-CD8+CD44+CD62L− lymphocytes.

### B. Results

### 1. Soluble CD40 Ligand (SCD40L) was Expressed by the 2-V Covid Vaccine

[0550] 293T cells were transfected with 2-V COVID vaccine and analyzed for expression of sCD40L. Using immunoprecipitation and Western blot methods, expression of sCD40L from the 2-V COVID vaccine was confirmed (FIG. 12; boxed bands indicate sCD40L).

### 2. 2-V Covid Vaccine Elicited a T Cell Response

[0551] Immunogenicity of the 2-V COVID vaccine was determined at 14 days after the first immunization and at 14 days after the second immunization (Table 2). The data show that the 2-V COVID vaccine induced a significantly enhanced T cell response compared to the first generation COVID-19 vaccine (FIGS. 13A-D). The data indicate that the presence of sCD40L improved the 2-V COVID vaccine by eliciting greater T-cell response.

### 3. 2-V Covid Vaccine Stimulated Spike-Specific CD4 and CD8 T Cells In Vivo

[0552] Greater numbers of CD4+ and CD8+ T cells were observed in splenocytes from mice vaccinated with the 2-V vaccine compared to the ITI-bicistronic vaccine (FIG. 14). The data indicate that the presence of sCD40L provided the enhancement. The CD4+ and CD8+ T cells were also stained for intracellular cytokines, and greater percentages of IFNγ, TNFα, and IL-2 in mice vaccinated with the 2-V vaccine compared to the ITI-bicistronic vaccine (FIG. 15).

### 4. 2-V Covid Vaccine Elicited a Spike-Specific Antibody Response In Vivo

[0553] Serum from immunized mice was analyzed by ELISA for $1-specific antibodies after one or two immunizations. FIGS. 16A-B show total IgG of S1-binding antibodies. FIGS. 16C-D show IgG2a antibodies. FIGS. 16E-F show IgG1 antibodies. The data demonstrate that 2-V COVID vaccine elicited a superior S1-specific antibody response compared to ITI-bicistronic vaccine. The IgG1 response was particularly pronounced after a single dose of the 2-V COVID vaccine (FIG. 16E).

### 5. Summary

[0554] The 2-V vaccine significantly enhanced spike-specific T cell responses, including both CD4+ and CD8+ T cell responses, compared to the first generation vaccine. The 2-V vaccine also enhanced S1-specific antibody responses, particularly IgG1 levels after a single immunization dose.

### Example 3. Soluble CD40L (SCD40L) is Expressed from the Her2-LAMP-SCD40L Bicistronic Vaccine

[0555] This Example discusses HER2-LAMP-sCD40L (FIG. 11; SEQ ID NO: 197), a bicistronic DNA vaccine encoding HER2-LAMP and a 4-trimer version of sCD40L. The data discussed herein support the use of bicistronic DNA vaccines against cancer.

[0556] CD40 ligand (CD40L) is a transmembrane protein expressed on the surface of activated T cells, particularly on CD4 T cells, that stimulates CD40-dependent activation of antigen-presenting cells (APCs), resulting in enhancement of T cell and antibody responses. Soluble multimeric forms of CD40L (sCD40L) may act as adjuvant to enhance vaccine immunogenicity. As described in this Example, the HER2-LAMP-sCD40L bicistronic construct was tested against a construct that expresses HER2-LAMP but without expressing any second polypeptide such as sCD40L. The HER2-LAMP-sCD40L elicited significantly enhanced HER2-specific T cell and antibody responses in mice compared with mice immunized with the control HER2-LAMP DNA. Intracellular staining revealed that inclusion of sCD40L in the vaccine induced potent antigen specific T cell (IFNgamma) production, primarily in CD4 T cells. Furthermore, in a murine TSA breast cancer mocel, HER2-LAMP-sCD40L significantly inhibited tumor growth and prolonged survival in a therapeutic vaccine setting, suggesting that the HER2-LAMP-sCD40L vaccine is an effective strategy to promote anti-tumor efficacy in vivo.

### A. Materials and Methods

[0557] In general, materials and methods used in this Example were as described in Examples 1-2 above, with the following modifications.

### 1. Vaccine Constructs

[0558] The HER2-LAMP-sCD40L bicistronic construct (FIG. 11; SEQ ID NO: 197) discussed in these Examples comprises two expression cassettes. The first cassette is driven by a CMV promoter to express a LAMP-HER2/ErBB2 fusion protein (SEQ ID NO: 195; or SEQ ID NO: 198 followed by SEQ ID NO: 200 followed by SEQ ID NO: 202). The second cassette is driven by an EF1 promoter to express soluble murine CD40 ligand (sCD40L; GenBank accession no. X65453.2), which encodes a 4-trimer soluble CD40L (Gómez et al., 2009; Stone et al., 2006) fused to the body of surfactant protein D (SPD) (SEQ ID NO: 196). Three amino acids, HRR, are present between SPD and sCD40L. The construct was designed so as to deliver the HER2 antigen to the MHC II compartment, which may enhance both antibody generation and CD4 T cell response, while the sCD40L polypeptide construct is secreted.

[0559] A HER2-LAMP construct without sCD40L was used as a control vaccine.

[0560] A bicistronic DNA vaccine encoding spike (Spike-LAMP) was used as a control vector (i.e., negative control).

### 2. Immunization and Serum Collection

[0561] Six-to eight-week old female C57BL/6 mice were bred and maintained at a licensed animal facility. The immunization schedule for HER2-LAMP-sCD40L vaccine is shown in FIG. 13A and Table 3. Mice were immunized with 20 μg of control vector or vaccine by intradermal (ID) injection to the ear. The experiment was terminated one week after the second dose, i.e., on day 22. Splenocytes were treated with 1 μg/mL HER2 pooled peptides for 48 hours.

TABLE 3
Immunization Schedule.

| | | Concentration | Dose | | # | Volume | Mice | | | |
|---|---|---|---|---|---|---|---|---|---|---|
| Group | Treatment | (mg/mL) | (μg) | Route | Mice | (μL) | ID | Day 0 | Day 14 | Day 22 |
| A | Control | 3.1 | 20 | ID | 5 | 20 | 001-005 | 1^{st} | 2^{nd} | Termination |
| | Vector | | | (ear) | | | | immunization | immunization | to determine |
| | Spike- | | | | | | | | | the T cell |
| | LAMP | | | | | | | | | and antibody |
| B | LAMP- | 3.0 | 20 | ID | 7 | 20 | 006-012 | | | |
| | Hinge- | | | (ear) | | | | | | |
| | HER2 | | | | | | | | | |
| C | LAMP- | 2.0 | 20 | IM | 7 | 20 | 013-019 | | | |
| | HER2- | | | (ear) | | | | | | |
| | sCD40L | | | | | | | | | |

### 3. Transient Transfections of Constructs and ELISA

[0562] 293T cells transfected with HER2-LAMP-sCD40L were analyzed for expression of sCD40L. A bicistronic DNA vaccine encoding spike (Spike-LAMP) as a negative control. Five days after transfection, the supernatant from these cells were collected and sCD40L was detected using ELISA.

### 4. Evaluation of Antigen-Specific T Cell Response by ELISPOT

[0563] Materials and methods were as described in Example 2 above, except overlapping HER2 peptides (purchased from Genscript or JPT) were used instead of overlapping spike peptides.

### 5. Flow Cytometry and Intracellular Cytokine Staining (ICS)

[0564] Splenocytes from immunized mice (FIG. 18A) were incubated for five hours with brefeldin A and monensin, with or without the HER2 peptide pool.

### 6. ELISA

[0565] The murine antibody response to HER2 was assessed by indirect ELISA. ELISA plates (MaxiSorp) were coated with 1 μg/ml HER2 protein overnight.

### 7. Statistics

[0566] Statistical analysis was performed using Prism software. One-way ANOVA was used to compare each group.

### 8. Murine Breast Tumor Model

[0567] Mice were immunized with two doses of HER2-LAMP-sCD40L or HER2-LAMP, followed by an injection of 2×10⁵ HER2-expressing TSA (murine mammary cancer) cells. Blood cells were stimulated with 1 μg/mL of HER2 peptide pool and analyzed by ELISPOT. Tumors were measured using a caliper.

### B. Results

### 1. Soluble CD40 Ligand (SCD40L) was Expressed by Her2-LAMP-SCD40L

[0568] 293T cells were transfected with HER2-LAMP-sCD40L and analyzed for expression of sCD40L. Using ELISA, expression of sCD40L from HER2-LAMP-sCD40L was confirmed (Fig. FIGS. 17A-B). For example, sCD40L was detected in the supernatant of the 293T cells.

### 2. Her2-Lamp-SCD40L Elicited Her2-Specific Cellular and Humoral Response

[0569] Immunogenicity of HER2-LAMP-sCD40L was determined day 22, which is one week after the second immunization dose (FIG. 18A and Table 3). The data show that mice vaccinated with HER2-LAMP-sCD40L had significant T cell response compared to mice vaccinated with HER2-LAMP, i.e., a vaccine constructed without sCD40L (FIGS. 18B-C). The data also show that mice vaccinated with HER2-LAMP-sCD40L had increased total IgG (FIG. 18D), IgG1 (FIG. 18D), and IgG2a (FIG. 18D) antibodies compared to mice vaccinated with HER2-LAMP control. Together, the data indicate that the presence of sCD40L facilitated improved T-cell and antibody responses in vivo.

3. Her2-LAMP-SCD40L Stimulated CD4 T Cells More Efficiently than CD8 T Cells

[0570] Splenocytes from immunized mice were incubated for five hours in the presence of brefeldin A and monensin (see methods part 5) with or without the HER2 peptide pool. Cells were then intracellularly stained and analyzed by flow cytometry. The effector memory CD4 or CD8 T cells were gated on CD3+CD44+CD62L−CD4+ or CD8% lymphocytes. Data in FIGS. 19A-B is indicated as mean+/−SEM in FIG. 19A and representative FACS plots in FIG. 19B. As shown in FIGS. 19A-B, HER2-LAMP-sCD40L stimulated CD4 T cells more efficiently than CD8 T cells. The data also indicate that the presence of sCD40L provided the enhanced stimulation of both CD4 and CD8 T cells (FIGS. 19A-B).

### 4. Her2-LAMP-SCD40L Elicited a Her2-Specific Antibody Response In Vivo

[0571] Serum from immunized mice was analyzed by ELISA for HER2-specific IgG antibodies after two immunizations of either HER2-LAMP-sCD40L or HER2-LAMP or a vector control (CV). FIG. 20 shows total IgG of HER2-binding antibodies. The data demonstrate that the presence of sCD40L elicited an improved antibody response compared to HER2-LAMP.

### 5. Summary

[0572] The HER2-LAMP-sCD40L vaccine elicited robust HER2-specific T cell and antibody responses in vivo. The vaccine also enhanced CD4 T cells compared to CD8 T cells, suggesting that sCD40L preferentially acts on CD4 T cells in vivo. Example 4 below discusses the effect of HER2-LAMP-sCD40L in a murine breast tumor model.

[0573] In separate work (not shown), a HER2-LAMP-sCD40L self amplifying RNA construct was also prepared and used to transfect BHK-21 cells, and it was confirmed by Western blot that the transfected cells secreted sCD40L.

### Example 4. Anti-Tumor Effect of Bicistronic Her2-Lamp IREG Expressing DNA Vaccines in a TSA Breast Cancer Model

[0574] Vaccine-induced immune responses can be enhanced by expression of immune response-enhancing-genes (IREGs), which can amplify the immune response, alter quality of the immune response, and/or create a tumor microenvironment conducive to immune cell infiltration. The preceding Example discusses that the addition of CD40L to DNA vaccines elicited enhanced T-cell and antibody responses in vivo. This Example discusses HER2-LAMP vaccines with the IREG Flt3L, IL-21, IL-21, or OX40L. The data demonstrate that HER2-LAMP-IREG vaccines enhance immunogenicity and have anti-tumor properties.

### A. Materials and Methods

[0575] In general, materials and methods used in this Example were as described in Examples 1-3 above, with the following modifications.

### 1. Vaccine Constructs

[0576] HER2-LAMP-sCD40L (SEQ ID NO: 197) and HER2-LAMP control were as discussed in Examples 1 and 3 above.

[0577] HER2-LAMP-mFLT3L (SEQ ID NO: 208), HER2-LAMP-IL-12 (SEQ ID NO: 212), HER2-LAMP-IL-21 (SEQ ID NO: 216), and HER2-LAMP-OX40L (SEQ ID NO: 241) were constructed as described in Example 1.

[0578] The control vector (CV) used the vector without any gene insertions.

### 2. Immunization

[0579] Six-to eight-week old female BALB/c mice were purchased from the Jackson Laboratory (Maine, USA. Two days after subcutaneous (sc) injection with 2×10⁵ TSA-HER tumor cells, the mice were immunized with DNA vaccines in the ear by ID. Mice were immunized three more times as shown in Table 4.

TABLE 4
Immunization Schedule.

| | | Dose | # | Vol | Mouse | | | | | | |
|---|---|---|---|---|---|---|---|---|---|---|---|
| Group | Vaccine | (μg) | Mice | (μL) | ID | Day 0 | Day 2 | Day 9 | Day 16 | Day 23 | Day 45 |
| A | Control | 20 | 10 | 20 | 41-50 | sc | First | Second | Third | Fourth | Last day |
| | Vector | | | | | injection | immunization | immunization | immunization | immunization | for |
| | (CV) | | | | | of | (ID ear) | (ID ear) | (ID ear) | (ID ear) | monitoring |
| B | HER2- | 20 | 10 | 20 | 51-60 | 2 × 10⁵ | | | | | tumor |
| | LAMP- | | | | | TSA- | | | | | growth |
| | CD40L | | | | | HER2 | | | | | and |
| C | HER2- | 20 | 10 | 20 | 61-70 | cells | | | | | mouse |
| | LAMP- | | | | | | | | | | survival |
| | Flt3L | | | | | | | | | | |
| D | HER2- | 20 | 10 | 20 | 71-80 | | | | | | |
| | LAMP- | | | | | | | | | | |
| | IL-21 | | | | | | | | | | |
| E | HER2- | 20 | 10 | 20 | 81-90 | | | | | | |
| | LAMP- | | | | | | | | | | |
| | IL-12 | | | | | | | | | | |
| F | HER2- | 20 | 10 | 20 | 91-100 | | | | | | |
| | LAMP- | | | | | | | | | | |
| | OX40L | | | | | | | | | | |

### 3. Tumor Monitoring

[0580] 2×10⁵ TSA-HER2 tumor cells were injected into mammary fat pad 2 days before the first immunization. Tumors were measured twice or once every week. Tumor diameter was calculated as the square root of length×width, and tumor volume was calculated using the formula 4/3πr³. Mice were euthanized when the tumor volume reached 2,000 mm³ or moribund.

### 4. Statistics

[0581] Results are shown as the mean±standard deviation. Statistical analyses were performed by using the GraphPad Prism software, version 9.0.2. Two-tailed student's T test was used. * p<0.05; ** p<0.01; *** p<0.001; **** p<0.0001.

### B. Results

### 1. Her2-LAMP-SCD40L Demonstrated Anti-Tumor Effect Against Her2 In Vivo

[0582] The effect of HER2-LAMP-sCD40L in a murine breast tumor model was tested. Mice were immunized with two doses of HER2-LAMP-sCD40L or HER2-LAMP before being challenged with HER2-expressing TSA cells. Blood cells from mice treated with HER2-LAMP-sCD40L had more IFNγ spots (FIG. 21A). Both HER2-LAMP-sCD40L or HER2-LAMP had an anti-tumor effect as mice treated with a either vaccine did not have tumor growth for 17 days (FIG. 21B). The mice were also observed for 45 days to determine if the vaccines had an impact on mouse survival. Probability of survival for were treated mice are shown in FIG. 22B. While both HER2-LAMP-sCD40L and HER2-LAMP enhanced mouse survival, HER2-LAMP-sCD40L appeared to be more protective against the HER2-expressing cells.

2. Bicistronic Vaccines with Immune Response-Enhancing Genes (IREGS) Demonstrated Anti-Tumor Effect In Vivo

[0583] The effect of HER2-LAMP in combination with other IREGs was tested. In addition to HER2-LAMP-CD40L, the following for vaccines were tested: (1) HER2-LAMP-Flt3L (SEQ ID NO: 208), (2) HER2-LAMP-IL-21 (SEQ ID NO: 216), (3) HER2-LAMP-IL-12 (SEQ ID NO: 212), and (4) HER2-LAMP-OX40L (SEQ ID NO: 241). In all instances, tumors in vaccinated mice showed slower growth rate than the tumors in CV-treated mice (FIG. 23). Of the five HER2-LAMP vaccines tested, HER2-LAMP-IL-21 showed the lowest levels of tumor suppression whereas HER2-LAMP-CD40L and HER2-LAMP-Flt3L showed the highest levels of tumor suppression (FIG. 23).

3. Bicistronic Vaccines with Immune Response-Enhancing Genes (IREGS) Improve Mouse Survival

[0584] All five HER2-LAMP-IREG vaccines-(1) HER2-LAMP-CD40L, (2) HER2-LAMP-Flt3L, (3) HER2-LAMP-IL-21, (4) HER2-LAMP-IL-12, and (5) HER2-LAMP-OX40L, were tested for their influence on mouse survival. The mice were first injected subcutaneously with TSA-HER2 cells, then administered four separate immunizations at 2, 9, 16, and 23 days after injection of the TSA-HER2 cells. Over the course of 45 days, mouse survival was monitored. The data show that all immunized mice had improved survival compared to mice treated with a control vector (CV) (FIG. 24). The mice that received HER2-LAMP-CD40L showed the highest probability of survival (FIG. 24).

### 4. Summary

[0585] Tumor growth was suppressed by all tested HER2-LAMP-IREG vaccines. CD40L provided the most anti-tumor protection, followed Flt3L and IL-12. Also, all HER2-LAMP-IREG vaccines improved mouse survival. Improvement in mouse survival correspond with vaccine suppression of tumor growth.

### Example 5. The Bicistronic Her2-LAMP-IL-15 Vaccine Elicits Antigen-Specific T-Cell Response in Mice

[0586] IL-15 is a T helper type 1 cytokine (Chen et al., 2014) that has been demonstrated to have a marked antitumor immune response and may reverse host tolerance of tumor antigens in certain preclinical trials. IL-15 is a 14-15 kDa 4 alpha-helix-bundle family cytokine family member that stimulates the generation of natural killer (NK) cells, natural killer T (NKT) cells, gamma delta (γδ) T cells, ILC1 cells, intraepithelial lymphocytes (IELs), innate cells expressing CD103+ CD56+ CD44+ and memory CD8 T cells (Motegi et al., 2008; Wu & Xu, 2010). IL-15, like IL-2, stimulates proliferation of T cells, induces generation of cytotoxic lymphocytes and memory phenotype CD8 T cells, and stimulates proliferation and maintenance of NK cells. in contrast to IL-2, IL-15 does not mediate activation-induced cell death (AICD), does not consistently activate Tregs, and may cause less capillary leak syndrome. IL-15 efficacy was observed in multiple murine immunotherapy trials, including trials with syngeneic transgene adenocarcinoma mouse prostate cancer cells (TRAMP-C2), Pmel-1 mice, B16 melanoma cells, Mc38 cells, and CT26 colon carcinoma cells. These studies suggest that IL-15 may be more effective than IL-2 in cancer therapy (Guo et al., 2021; Heon et al., 2015; Klebanoff et al., 2004; Morris et al., 2014; Rauch et al., 2014).

[0587] This Example discusses the effect of IL-15 on the mouse immune response induced by a bicistronic HER2 DNA vaccine). The immune response induced by HER2-LAMP, HER2-LAMP-CD40L and HER2-LAMP-IL-15 were compared.

### A. Materials and Methods

[0588] In general, materials and methods used in this Example were as described in Examples 1-4 above, with the following modifications.

### 1. Vaccine Constructs

[0589] The vaccines discussed in this Example are LAMP-Hinge-HER2 (expressing HER2-LAMP alone without an IREG polypeptide), a HER2-LAMP-IL-15 construct (expressing polypeptides HER2-LAMP, see, e.g., SEQ ID NO: 195, and secreted IL-15, e.g., IL-15 with an Ig-kappa signal sequence SEQ ID NO: 225), LAMP-HER2-CD40L (SEQ ID NO: 197), and control vector (CV, i.e., the vector without any gene insertions). These vaccines were prepared as described in the preceding Examples.

### 2. Immunization

[0590] Six-to eight-week old female BALB/c mice were bred and maintained at a licensed animal facility. Mice were treated with vaccines as shown in Table 5 below by intradermal (ID) injection in the ear. Mice were immunized with vaccine on days 0 and 16. Mice were bled on day 36. Serum was collected and stored at −30° C. Spleens were collected on days 14 and 36 and processed for ELISPOT to evaluate HER2-specific T cell responses.

TABLE 5
Immunization Schedule.

| | | Concentration | Dose | # | Vol | Mouse | | | | Day | | |
|---|---|---|---|---|---|---|---|---|---|---|---|---|
| Group | Vaccine | (mg/mL) | (μg) | Mice | (μL) | ID | Day −1 | Day 0 | Day 14 | 15-17 | Day 29 | Day 36 |
| A | Control | 3.3 | 20 | 10 | 20 | 2095- | Prebleed | First | Terminated | Second | Bled | Terminated |
| | Vector | | | | | 2104 | | [symbol] | [symbol] | [symbol] | serum | [symbol] |
| | (CV) | | | | | | | | | | | |
| B | LAMP- | 3.0 | 20 | 10 | 20 | 2105- | | | | | | |
| | Hinge- | | | | | 2114 | | | | | | |
| | HER2 | | | | | | | | | | | |
| C | HER2- | 2.0 | 20 | 10 | 20 | 2115- | | | | | | |
| | LAMP | | | | | 2124 | | | | | | |
| | CD40L | | | | | | | | | | | |
| D | HER2- | 1 | 20 | 10 | 50 | 2125- | | | | | | |
| | LAMP | | | | | 2134 | | | | | | |
| | IL-15 | | | | | | | | | | | |

[symbol]

indicates data missing or illegible when filed

### 3. Evaluation of Antigen-Specific T Cell Response

[0591] Splenocytes were depleted of red blood cells (RBCs) and co-cultured in U-bottom 96-well plates in 200 μl/well T cell media (RPMI-1640 with L-Glutamine and HEPES (ATCC), 1% penicillin, 1% streptomycin, and 5×10⁵M betamercaptoethanol (3ME)) at 1×10⁶ cells/well and 1 μg/mL HER2 peptide mix or medium alone under Brefeldin A for 5 hours at 37° C. in 5% CO₂. The plates were centrifuged at 1200 rpm for 6 minutes and cell pellets were collected for intracellular staining.

### 4. ELISPOT

[0592] While general materials and methods that relate to ELISPOT analysis for T cell response were as described in Examples 2-3 above, modifications and particular details that relate to this Example are provided herein. 96-well nitrocellulose plates (Millipore), were coated overnight at 4° C. with 100 μL/well of capture monoclonal antibody in PBS. The plates were washed three times in 200 μL/well T cell media and blocked with 200 μL/well T cell media for at least 2 hours at room temperature. splenocytes were plated at 3×10⁵ cells/well and co-cultured with 1 μg/well T cell media (RPMI-1640 with L-Glutamine and HEPES (ATCC), 1% penicillin, 1% streptomycin, and 5×10⁵M betamercaptoethanol (BME)) for 48 hours at 37° C. in 5% CO₂. The plates were washed two times with 200 μL/well PBS and two times with 200 μL/well PBS-T (0.05% Tween in PBS). Diluted detection antibodies (50 μL/well in PBS-T/0.5% BSA) were added and plates were incubated for 2 hours with shaking at room temperature. Plates were washed four times with PBS four times. Streptavidin-alkaline phosphates diluted in PBS (50 μL/well) were added and incubated for 2 hours. Plates were washed with PBS four times and developed with 50 μL/well of 3-amino-9-ethylcarbazole (AEC, BD Bioscience) substrate for 10 min. Color development was stopped by washing under running tap water. After drying 72 hours at room temperature in the dark, colored spots were counted using an AID ELISPOT High-Resolution Reader System and AID ELISPOT Software version 3.5 (Autoimmun Diagnostika GmbH).

### 5. Flow Cytometry

[0593] While general materials and methods that relate to ELISPOT analysis for T cell response were as described in the preceding Examples, modifications and particular details that relate to this Example are provided herein. Cells were first labeled with Zombie aqua fixable viability dye in PBS (1:500 dilution) followed by surface antibodies (1:100 dilution) in staining buffer (4% FBS, 2% rat serum, 2% mouse serum in PBS). For intracellular staining cells were stained with Zombie aqua, followed by surface staining, fixation with 4% paraformaldehyde, and stained with intracellular antibody in permeabilization buffer (PBS with 1% FCS, 0.1% saponin).

### 6. Statistics

[0594] T-test was performed using GraphPad Prism 6.0 software to evaluate the statistical significance. Each mouse's RPMI result was deducted from the results of the antigen activation.

### B. Results

### 1. Her2-LAMP-IL-5 Elicited Strong T-Cell Response

[0595] When compared to a HER2 vaccine without an IREG (LAMP-Hinge-HER2), two bicistronic vaccines with IREG, HER2-LAMP-IL-15, and HER2-LAMP-CD40L, induced stronger antigen-specific antibody response as measured by ELISA (FIG. 25). The bicistronic vaccines also elicited strong T-cell response. While one dose either bicistronic vaccine was sufficient to elicit said response (FIG. 26), two doses of HER2-LAMP-IL-15 elicited a stronger response than two doses of either LAMP-Hinge-HER2 or HER2-LAMP-CD40L (FIGS. 27A-B).

### 2. Summary

[0596] The immune response induced by Hinge-LAMP-HER2, HER2-LAMP-IL-15, and HER2-LAMP-CD40L were compared. Both bicistronic vaccines, HER2-LAMP-IL-15, and HER2-LAMP-CD40L, induced robust T cell response compared to Hinge-LAMP-HER2, especially when two doses of each vaccine were administered. Both bicistronic vaccines enhanced CD4 T cells to produce IFNγ compared with CD8 T cells. However, there was no significant difference between HER2-CD40L and HER2-IL-15 treatments. A study is ongoing to determine the anti-tumor activity of HER2-LAMP-IL-15.

[0597] Variations, modifications, and other implementations of what is described herein will occur to those of ordinary skill in the art without departing from the spirit and scope of the disclosure and the claims. All of the patents, patent applications, international applications, and references identified are expressly incorporated herein by reference in their entireties.

### Example 6. Anti-Tumor Activity of Bicistronic Her2-LAMP-Soluble-CD40L In Vivo

### A. Introduction

[0598] The anti-tumor efficacy of non-bicistronic HER2-LAMP and bicistronic HER2-LAMP-sCD40L, delivered by DNA vectors, was compared in a breast tumor model and the cytokine profile in the tumor microenvironment was explored. The administration and analysis schedule is shown in FIG. 29A. The overall results, collectively shown in FIGS. 29-39, showed that bicistronic HER2-LAMP-sCD40L enhances anti-tumor effect by significantly suppression of tumor growth (FIGS. 29 and 36); bicistronic HER2-LAMP-sCD40L systematically affects memory T cells and infiltration of T cells into the tumor micro-environment (TME) (FIGS. 30-31); bicistronic HER2-LAMP-sCD40L induces antigen-presenting cells to produce IL-12 by activation of DC1 dendritic cells in the draining lymph nodes (FIG. 32); bicistronic HER2-LAMP-sCD40L activates inflammatory response in the TME, turning the tumor from “cold” to “hot” (FIG. 33); bicistronic HER2-LAMP-sCD40L promotes CD4 T cells to produce PD-1 in the TME (FIG. 34); bicistronic Her2-LAMP-sCD40L elicits stronger IFNg production compared to Her2-LAMP DNA vaccine in the spleens (FIG. 37); soluble CD40L expressed by the constructs induces antigen-presenting cells to enhance DC1 activation in the spleen (FIG. 38); and bicistronic Her2-LAMP-sCD40L increases CD4 and CD8 T cells in the peritumor and intratumor tissues (FIG. 39).

### B. Summary and Results

[0599] To test the ability of non-bicistronic HER2-LAMP and bicistronic HER2-LAMP-sCD40L to suppress tumor growth in vivo, in a breast tumor model, female BALB/c mice were inoculated with 1×10⁵ TSA cells expressing Her2 (injected into mammary fat pad) on day zero, followed by immunization with 20 μg of control vector, Her2-LAMP, or Bicistronic-Her2-LAMP-sCD40L in 20 μl PBS on day 2, and 9. There were seven mice in each treatment group. Tumor size was monitored by caliper. Tumor diameter was calculated as the square root of length×width, and tumor volume was calculated using the formula 4/3πr³. Serum was collected 5 days after the last dose (or on day 14). The experiment was terminated 6 days after the last dose (or on day 15), and tumors were weighed at the termination. FIG. 29A shows a schematic of the study design. FIG. 29B-C show results from a run of this experiment with seven mice in each group. These figures show the change in tumor size (in mm³) from 4 to 13 days post tumor transplantation, for the individual animals and for each animal group. As can be seen in FIGS. 29B-C, the bicistronic constructs suppressed tumor growth more effectively than either the HER2-LAMP or control. FIG. 29D shows the change in tumor weight (in g). As can be seen in the figure, there was a statistically significant reduction in tumor weight comparing the bicistronic construct to the control (** p<0.01) as well as a statistically significant difference in tumor weight between the HER2-LAMP and bicistronic construct groups (* p<0.05).

[0600] For subsequent experiments, tumors were minced with scissors into 2- to 4-mm pieces placed into a gentleMACS™ C tube containing 2.5 ml dissociation medium (2.35 ml RPMI with 100 ul of enzyme D, 50 ul of enzyme R and 12.5 μl of enzyme A). Tumors were processed on the gentleMACS™ dissociator, followed by incubation at 37° C. The cells were filtered through a 70-mm mesh filter and washed twice with 10 ml RPMI (300 g for 7 mins), then resuspended in PBS/1% FBS staining buffer and incubated with fluorescent antibodies, and subjected to flow cytometry as described below. Fluorescently coupled CD3, CD45, CD11c, CD11b, CD103, PD-1, PD-L1, NK1.1, CD25, FoxP3, CD24, IL-12, IL-2, CD4, CD8, CD44, CD62L, IFNγ, TNFα monoclonal antibodies and Zombie aqua fixable viability kit were purchased from BioLegend (San Diego, CA). One-Way ANOVA was performed using GraphPad Prism® 6.0 software to evaluate the statistical significance, as described below. Each mouse's RPMI result was deducted from the results of the antigen activation.

[0601] FIG. 30 shows the percentage of CD3+ memory T cells in splenocytes at termination in each of the treatment groups. Splenocytes were stained by Zombie, a cell surface marker, and intracellular staining according to an in-house staining protocol. Cells were gated on Zombie−CD44+CD62L−CD3+ memory T cells. Data in FIG. 30 is representative of mean±SEM (7 mice per group). Based on this experiment, there was a statistically significant increase in CD3+ memory T cells in the bicistronic HER2-LAMP-sCD40L treatment group compared to the control, as shown in the figure (* p<0.05).

[0602] FIGS. 31A-C show that the bicistronic HER2-LAMP-sCD40L construct promoted infiltration of T cells into the tumor microenvironment (TME). One day after termination, tumors were cleaned, weighed, digested using Miltenyi® tumor dissociation kit and the gentleMACS™ dissociator, and stained with fluorescent antibodies. Cells were gated on CD45+CD3+Zombie− population for CD4 and CD8, and CD45+CD3+Zombie− CD44+CD62L− for effector memory T cells (TEM cells). Results are shown in FIGS. 31A-C, and the data is representative of mean±SEM. As the data shows, there is statistically higher infiltration of T cells into the tumor microenvironment in mice administered the bicistronic construct compared to the control or HER2-LAMP construct.

[0603] FIGS. 32A-C show that the soluble CD40L expressed from the bicistronic constructs in the mice and that it enhanced activation of type 1 dendritic cells (DC1 cells) producing IL-12 in draining lymph nodes. After termination, lymphocyte cells were prepared and stained by the Zombie surface marker, and intracellular staining was conducted according to an in-house staining protocol. DC1 cells were gated on Zombie−CD45+MHCII+CD11c+CD24+CD103+ cells, as shown in FIG. 32A. DC cells were defined as MHCII+CD11C+, while DC1 cells were defined as MHCII+CD11C+CD24+CD103+CD11b−, and DC2 cells were defined as MHCII+CD11C+CD24+CD11b+. FIG. 32B shows the percentage of DC1 cells expressing CD8, while FIG. 32C shows the percentage of DC1 cells expressing IL-12. One-way ANOVA statistical analysis shows that the bicistronic constructs led to a statistically significant increase in such IL-12-expressing DC1 cells compared to both the control and the HER2-LAMP experiments.

[0604] FIGS. 33A-B show that the bicistronic HER2-LAMP-sCD40L construct activates an inflammatory signal in the tumor microenvironment. One day after termination of the experiments, tumors were cleaned, weighed, digested using Miltenyi® tumor dissociation kit and the gentleMACS™ dissociator, and stained with fluorescent antibodies. Cells were gated on Zombie−CD45+CD69CD4+/CD8+ cells. Data is representative of mean±SEM. As shown in the figures, there was a statistically significant increase in CD4+CD69+ and CD8+CD69+ cells in the tumor after treatment with the bicistronic construct compared to the control (* indicates p<0.5).

[0605] Further data, shown in FIGS. 34A-B, indicates that the bicistronic construct also promoted T cells to produce PD-1 in the tumor microenvironment. One day after termination of the experiments, tumors were cleaned, weighed, digested using Miltenyi® tumor dissociation kit and the gentleMACS™ dissociator, and stained with fluorescent antibodies. Cells were gated on CD45+CD3+PD1+CD4+Zombie− population for CD4 and CD45+CD3+PD1+CD8+Zombie− for CD8. As shown in the figures, the bicistronic construct showed a statistically significant increase in the number of CD4 PD-1+ cells compared with both the control and the HER2-LAMP construct.

[0606] Further data showing that bicistronic HER2-LAMP-sCD40L suppressed tumor growth in a statistically significant fashion in comparison to HER2-LAMP and control, following the protocol set forth in FIG. 29A, are provided in FIG. 36, in which the experiment was repeated with 5 mice per group. Following this run of the experiment with 5 mice per group, additional data were collected. FIG. 35 shows that the bicistronic construct also induced a stronger T cell response against particular pooled peptides of HER2 extracellular domain (ECD). At the termination of the experiment, splenocytes from the mice were incubated with 1 μg/ml of Her2 pooled peptides (individual peptides were synthesized from GenScript and pooled in six different pools called P1-P6) for 48 hrs. Data represent original spots (top) and mean IFNγ spot forming cells ±SEM (bottom, n=5). Two-way ANOVA was used for statistical analysis. * p<0.05, *** p<0.001, **** p<0.0001. Specifically, splenocytes from vaccinated mice were evaluated for antigen-specific IFNγ production by Enzyme-linked immunospot (ELISPOT), and colored spots following addition of detection antibodies were counted using an AID ELISPOT High-Resolution Reader System and AID ELISPOT Software version 3.5 (Autoimmun Diagnostika GmbH). For flow cytometry, cells were first labelled with Zombie aqua fixable viability dye in PBS (1:500 dilution), followed by surface antibodies (1:100 dilution) in staining buffer (4% FBS, 2% rat serum, 2% mouse serum in PBS). For intracellular staining cells were stained with Zombie aqua, followed by surface staining, fixation with 4% paraformaldehyde, and stained with intracellular antibody in permeabilization buffer (PBS with 1% FCS 0.1% saponin). Samples were analyzed on a CytoFlex® flow cytometer (Beckman Coulter) and analyzed using Kaluza® software (Beckman Coulter). Bar graphs from the FACS analysis provided in FIG. 37A-D show that the bicistronic HER2-LAMP-sCD40L construct induced polyfunctional CD4 effector memory T cells in the spleen. For this analysis, splenocytes were incubated with Her2 pooled peptides (individual peptide was synthesized from GenScript) in the presence of Brefeldin A and Monesin for 6 hrs. Cells were harvested and stained by Zombie, surface marker, and were intracellularly stained and were gated on memory T cells. FIG. 37A-D show bar graphs from the FACS. Data is representative of mean plus/minus SEM. Two-way ANOVA was used for statistical analysis, where *P<0.05, ** p<0.01, **** p<0.0001.

[0607] Dendritic cells from this second run of the experiment with 5 mice per group were also analyzed. As shown in FIGS. 38A-B, splenocytes were harvested and stained by Zombie, and gated on Zombie−CD45+MHCII+CD11c+CD24+CD103+, and the percentage of such CD24+CD11b−CD103+ dendritic cells was determined. As shown in FIG. 38B, there were statistically more such cells in the spleen of mice receiving the bicistronic construct compared to the control and compared to the HER2-LAMP construct (* p<0.05, ** p<0.01; n=5 per group).

[0608] Finally, FIG. 39 further shows the results of cell staining data indicating that the sCD40L expressed from the bicistronic construct increased CD4+ and CD8+ T cells in the tumor in a statistically significant fashion compared to the control and the HER2-LAMP constructs. Specifically, after termination of the in vivo experiments, tumors were collected and fixed in 10% formalin. The tissues were cut and mounted on slides and stained with DAPI, anti-CD4 or anti-CD8, and anti-FoxP3 by Ultivue (Cambridge, MA, USA). FIGS. 39A-B show bar graphs analyzed from the original imaging data. Data is representative of mean±SEM. n=3 for CV and HER2-LAMP and n=4 for Her2-LAMP-sCD40L. One-way ANOVA was used for statistical analysis. ** p<0.01, *** p<0.001.

### Example 7. In Vivo Studies with Bicistronic Her2-LAMP-mFlt3L and Her2-LAMP-SCD40L

[0609] The objective of this study was to determine if the immune response would be enhanced by immunization with both bicistronic HER2-LAMP-sCD40L and HER2-LAMP-mFlt3L constructs provided as DNA vectors. Six to eight-week old Balb/c mice were purchased from the Jackson Laboratory (Maine, USA). 20 μg of Control vector, HER2-LAMP (also called HER2-hinge-LAMP), Bicistronic-Her2-LAMP-sCD40L, Bicistronic-HER2-LAMP-mFlt3L, or both Her2-LAMP-sCD40L and HER2-LAMP-mFlt3L vaccines were used in a total volume of 20 μl per mouse per dose for intradermal injection. Seven mice were included in each group. Mice were immunized on days 0, and 14, and terminated 10 days after the second dose. Her2-specific T cell responses were evaluated by ELISPOT and FACS assays. The experiment was terminated ten days after the last dose. Splenocytes were incubated with Her2 pooled peptides (GenScript) for 48 hrs. Data are shown in FIGS. 40A-B and represent original spots (top) and mean IFNγ spot forming cells ±SEM. One-Way ANOVA was used for statistical analysis (* p<0.05, ** p<0.01, *** p<0.001). As can be seen in FIGS. 40A-B, Her2-LAMP-mFlt3L induced significantly stronger T cells response recalled by Her2 pooled peptides 1, 2, 3, 4 and 5, while Her2-LAMP and Her2-LAMP-sCD40L only elicited T cell response against pooled peptide 1 and 2. Furthermore, each of the bicistronic constructs, when administered individually led to splenocyte recognition of particular pooled Her2 ECD peptides, but no synergistic effect was seen with respect to such recognition.

[0610] As shown in FIG. 41, bicistronic Her2-LAMP-sCD40L, Her2-LAMP-mFlt3L, and the combined vaccines also induced higher antibody response compared to the monocistronic DNA, with the Her2-LAMP-mFlt3L vaccine showing the highest antibody response. Specifically, at the termination of the experiment, serum samples were collected, and HER2-specific IgG were measured by indirect ELISA. The data are shown in FIG. 41, and represent mean of antibody titers ±SEM. n=6 per group. T-test was used for statistical analysis. * p<0.05, ** p<0.01, *** p<0.001.

[0611] The studies further demonstrated that Her2-LAMP-sCD40L increases polyfunctional CD4 T cells while Her2-LAMP-mFlt3L enhances polyfunctional CD8 T cells in comparison of the Her2-LAMP DNA vaccine, as shown in FIG. 42A-D. For this analysis, splenocytes (1×10⁶/well) were stimulated with Her2 pooled peptides (1 μg/ml, GenScript) in T cell media (RPMI with 10% heat inactivated FBS, 1% penicillin/streptomycin, and 1X β-ME) with monensin and brefeldin A for 5 hours. Cells were harvested and stained by Zombie, surface marker, and intracellular staining according to an in-house staining protocol. Cells were gated for FACS on memory T cells. FIGS. 42A-D show bar graphs analyzed from the original FACS. Data is representative of mean±SEM. One-Way ANOVA was used for statistical analysis. * p<0.05, ** p<0.01, *** p<0.001, **** p<0.0001.

### Example 8. In Vivo Studies with Bicistronic Her2-LAMP-mFlt3L and Her2-LAMP-IL-12

[0612] In further experiments, female Balb/c mice were injected with 20 μg of a DNA vector encoding Her2-LAMP or Her2-LAMP-IL-12 or Her2-LAMP-mFlt3L or 20 μg of control vector or mixture of Her2-LAMP-IL-12 and Her2-LAMP-mFlt3L intradermally on day 0, and 14. Serum samples were collected on day 22. Her 2 specific IgG were measured by indirect ELISA. Results are shown in FIG. 43, indicating that Her2-LAMP-mFlt3L constructs provided a higher antibody response than Her2-LAMP-IL-12 constructs.

### REFERENCES

[0613] Beatty, G. L., Chiorean, E. G., Fishman, M. P., Saboury, B., Teitelbaum, U. R., Sun, W., Huhn, R. D., Song, W., Li, D., Sharp, L. L., Torigian, D. A., O'Dwyer, P. J., & Vonderheide, R. H. (2011). CD40 agonists alter tumor stroma and show efficacy against pancreatic carcinoma in mice and humans. Science (New York, N.Y.), 331 (6024), 1612-1616. https://doi.org/10.1126/science.1198443
[0614] Beatty, G. L., Li, Y., & Long, K. B. (2017). Cancer immunotherapy: Activating innate and adaptive immunity through CD40 agonists. Expert Review of Anticancer Therapy, 17 (2), 175-186. https://doi.org/10.1080/14737140.2017.1270208
[0615] Chen, X., Ni, J., Meng, H., Li, D., Wei, Y., Luo, Y., & Wu, Y. (2014). Interleukin-15: A potent adjuvant enhancing the efficacy of an autologous whole-cell tumor vaccine against Lewis lung carcinoma. Molecular Medicine Reports, 10 (4), 1828-1834. https://doi.org/10.3892/mmr.2014.2474
[0616] Gómez, C. E., Nájera, J. L., Sánchez, R., Jiménez, V., & Esteban, M. (2009). Multimeric soluble CD40 ligand (sCD40L) efficiently enhances HIV specific cellular immune responses during DNA prime and boost with attenuated poxvirus vectors MVA and NYVAC expressing HIV antigens. Vaccine, 27 (24), 3165-3174. https://doi.org/10.1016/j.vaccine.2009.03.049
[0617] Grewal, I. S., & Flavell, R. A. (1998). CD40 and CD154 in cell-mediated immunity. Annual Review of Immunology, 16, 111-135. https://doi.org/10.1146/annurev.immunol.16.1.111
[0618] Guo, J., Liang, Y., Xue, D., Shen, J., Cai, Y., Zhu, J., Fu, Y.-Y., & Peng, H. (2021). Tumor-conditional IL-15 pro-cytokine reactivates anti-tumor immunity with limited toxicity. Cell Research, 31 (11), 1190-1198. https://doi.org/10.1038/s41422-021-00543-4
[0619] Heon, E. K., Wulan, H., Macdonald, L. P., Malek, A. O., Braunstein, G. H., Eaves, C. G., Schattner, M. D., Allen, P. M., Alexander, M. O., Hawkins, C. A., McGovern, D. W., Freeman, R. L., Amir, E. P., Huse, J. D., Zaltzman, J. S., Kauff, N. P., Meyers, P. G., Gleason, M. H., Overholtzer, M. G., . . . . Press, O. A. (2015). IL-15 induces strong but short-lived tumor-infiltrating CD8 T cell responses through the regulation of Tim-3 in breast cancer. Biochemical and Biophysical Research Communications, 464 (1), 360-366. https://doi.org/10.1016/j.bbrc.2015.06.162
[0620] Klebanoff, C. A., Finkelstein, S. E., Surman, D. R., Lichtman, M. K., Gattinoni, L., Theoret, M. R., Grewal, N., Spiess, P. J., Antony, P. A., Palmer, D. C., Tagaya, Y., Rosenberg, S. A., Waldmann, T. A., & Restifo, N. P. (2004). IL-15 enhances the in vivo antitumor activity of tumor-reactive CD8+ T cells. Proceedings of the National Academy of Sciences of the United States of America, 101 (7), 1969-1974. https://doi.org/10.1073/pnas.0307298101
[0621] Le Bert, N., Tan, A. T., Kunasegaran, K., Tham, C. Y. L., Hafezi, M., Chia, A., Chng, M. H. Y., Lin, M., Tan, N., Linster, M., Chia, W. N., Chen, M. I.-C., Wang, L.-F., Ooi, E. E., Kalimuddin, S., Tambyah, P. A., Low, J. G.-H., Tan, Y.-J., & Bertoletti, A. (2020). SARS-COV-2-specific T cell immunity in cases of COVID-19 and SARS, and uninfected controls. Nature, 584 (7821), 457-462. https://doi.org/10.1038/s41586-020-2550-z
[0622] Morris, J. C., Ramlogan-Steel, C. A., Yu, P., Black, B. A., Mannan, P., Allison, J. P., Waldmann, T. A., & Steel, J. C. (2014). Vaccination with tumor cells expressing IL-15 and IL-15Rα inhibits murine breast and prostate cancer. Gene Therapy, 21 (4), 393-401. https://doi.org/10.1038/gt.2014.10
[0623] Motegi, A., Kinoshita, M., Inatsu, A., Habu, Y., Saitoh, D., & Seki, S. (2008). IL-15-induced CD8+CD122+ T cells increase antibacterial and anti-tumor immune responses: Implications for immune function in aged mice. Journal of Leukocyte Biology, 84 (4), 1047-1056. https://doi.org/10.1189/jlb.0807530
[0624] Rauch, D. A., Harding, J. C., & Ratner, L. (2014). IL-15 deficient tax mice reveal a role for IL-1a in tumor immunity. PloS One, 9 (1), e85028. https://doi.org/10.1371/journal.pone.0085028
[0625] Schoenberger, S. P., Toes, R. E., van der Voort, E. I., Offringa, R., & Melief, C. J. (1998). T-cell help for cytotoxic T lymphocytes is mediated by CD40-CD40L interactions. Nature, 393 (6684), 480-483. https://doi.org/10.1038/31002
[0626] Stone, G. W., Barzee, S., Snarsky, V., Kee, K., Spina, C. A., Yu, X.-F., & Kornbluth, R. S. (2006). Multimeric soluble CD40 ligand and GITR ligand as adjuvants for human immunodeficiency virus DNA vaccines. Journal of Virology, 80 (4), 1762-1772. https://doi.org/10.1128/JVI.80.4.1762-1772.2006
[0627] van Mierlo, G. J. D., den Boer, A. T., Medema, J. P., van der Voort, E. I. H., Fransen, M. F., Offringa, R., Melief, C. J. M., & Toes, R. E. M. (2002). CD40 stimulation leads to effective therapy of CD40 (−) tumors through induction of strong systemic cytotoxic T lymphocyte immunity. Proceedings of the National Academy of Sciences of the United States of America, 99 (8), 5561-5566. https://doi.org/10.1073/pnas.082107699
[0628] Vonderheide, R. H., Dutcher, J. P., Anderson, J. E., Eckhardt, S. G., Stephans, K. F., Razvillas, B., Garl, S., Butine, M. D., Perry, V. P., Armitage, R. J., Ghalie, R., Caron, D. A., & Gribben, J. G. (2001). Phase I study of recombinant human CD40 ligand in cancer patients. Journal of Clinical Oncology: Official Journal of the American Society of Clinical Oncology, 19 (13), 3280-3287. https://doi.org/10.1200/JCO.2001.19.13.3280
[0629] Wu, Z., & Xu, Y. (2010). IL-15R alpha-IgG1-Fc enhances IL-2 and IL-15 anti-tumor action through NK and CD8+ T cells proliferation and activation. Journal of Molecular Cell Biology, 2 (4), 217-222. https://doi.org/10.1093/jmcb/mjq012

### EQUIVALENTS

[0630] The foregoing written specification is considered to be sufficient to enable one skilled in the art to practice the embodiments. The foregoing description and Examples detail certain embodiments and describe the best mode contemplated by the inventors. It will be appreciated, however, that no matter how detailed the foregoing may appear in text, the embodiment may be practiced in many ways and should be construed in accordance with the appended claims and any equivalents thereof.

[0631] As used herein, the term about refers to a numeric value, including, for example, whole numbers, fractions, and percentages, whether or not explicitly indicated. The term about generally refers to a range of numerical values (e.g., +/−5-10% of the recited range) that one of ordinary skill in the art would consider equivalent to the recited value (e.g., having the same function or result). When terms such as at least and about precede a list of numerical values or ranges, the terms modify all of the values or ranges provided in the list. In some instances, the term about may include numerical values that are rounded to the nearest significant figure.

1. An isolated nucleic acid molecule comprising
a. a first polynucleotide sequence encoding a polypeptide comprising two homology domains of a luminal domain of a LAMP protein, and an antigenic domain heterologous to the LAMP protein (collectively a “LAMP-antigen Construct”), wherein the antigenic domain is placed between the two homology domains; and
b. a second polynucleotide sequence encoding at least one second polypeptide comprising an immune response enhancing gene polypeptide (IREG) or an extracellular domain of an IREG comprising a secretion signal sequence.

2. The isolated nucleic acid molecule of claim 1, wherein the LAMP protein is selected from LAMP-1, LAMP2, LAMP-3, lysosomal integral membrane protein-2 (“LIMP 2”), Macrosailin, Endolyn, LAMP5 or limbic system-associated membrane protein (“LIMBIC”).

3. The isolated nucleic acid molecule of claim 2, wherein the LAMP protein is comprises an amino acid sequence selected from any one of SEQ ID NO: 1-113, or comprises an amino acid sequence at least 70%, at least 75%, at least 80%, at least 85%, at least 90%, at least 95%, at least 96%, at least 97%, at least 98%, or at least 99% identical to SEQ ID NO: 1-113.

4. (canceled)

5. The isolated nucleic acid molecule of claim 2, wherein the LAMP protein is LAMP-1 and wherein the two homology domains of the LAMP-antigen Construct comprise LAMP-1 Homology Domain 1 and LAMP-1 Homology Domain 2.

6. The isolated nucleic acid molecule of claim 5, wherein the human LAMP-1 Homology Domain 1 comprises (a) the amino acid sequence of residues 29-194 of SEQ ID NO: 1 or comprises the amino acid sequence of residues 29-195 of SEQ ID NO: 198, or (b) a variant of (a) wherein said variant comprises an amino acid sequence at least 95% or at least 95% identical to the amino acid sequence of (a); and/or the human LAMP-1 Homology Domain 2 comprises the amino acid sequence of residues 228-381 of SEQ ID NO: 1.

7. (canceled)

8. The isolated nucleic acid molecule of claim 1, wherein the LAMP-antigen Construct comprises a linker between at least one of the two homology domains and the antigenic domain.

9. The isolated nucleic acid molecule of claim 8, wherein the linker comprises an amino acid sequence of GPGPG or PMGLP.

10. The isolated nucleic acid molecule of claim 1, wherein the LAMP-antigen Construct further comprises a transmembrane domain and/or cytoplasmic domain of a LAMP Protein.

11. The isolated nucleic acid molecule of claim 10, wherein the transmembrane domain comprises residues 383 to 405 of SEQ ID NO: 1 and/or wherein the cytoplasmic domain comprises residues 406-417 of SEQ ID NO: 1.

12. The isolated nucleic acid molecule of claim 1, wherein the LAMP-antigen Construct further comprises a signal sequence.

13. The isolated nucleic acid molecule of claim 12, wherein the signal sequence is derived from a LAMP Protein, such as a signal sequence comprising residues 1-28 of SEQ ID NO: 1 or residues 1-28 of SEQ ID NO: 198.

14. (canceled)

15. (canceled)

16. The isolated nucleic acid molecule of claim 1, wherein the IREG comprises one or more of CD40L, CD80, OX40, Flt3L, GM-CSF, IL-12, IL-21, IL-23, IL-15, CD70, CD86, IL-7, IL-18, or IL-33, or an extracellular domain thereof, optionally wherein the CD40L, CD80, OX40, Flt3L, GM-CSF, IL-12, IL-21, IL-23, or IL-15 is fused to an Fc domain of an immunoglobulin.

17. The isolated nucleic acid molecule of claim 1, wherein the secretion signal sequence is heterologous to the IREG and/or derived from IgK VIII, Ig-kappa, tetranectin, or IL-2, and/or wherein the second polypeptide further comprises pulmonary surfactant associated protein D (SPD).

18. (canceled)

19. The isolated nucleic acid molecule of claim 17, wherein the second polypeptide is expressed under the control of an EF-1alpha core promoter, such as that of SEQ ID NO: 124.

20. A composition comprising the isolated nucleic acid molecule of claim 1.

21. A host cell comprising the isolated nucleic acid molecule of claim 1.

22. A composition comprising the host cell of claim 21.

23. A method of treating a subject having a disease or a disorder or of inducing an immune response in a subject with a disease or disorder or at risk of developing a disease or disorder, wherein the method comprises administering to the subject the isolated nucleic acid molecule of claim 1, the composition comprising the isolated nucleic acid molecule, or the host cell comprising the isolated nucleic acid molecule, in an amount sufficient to treat the disease or disorder or to induce an immune response in the subject,
optionally wherein the method further comprises administering at least one second therapeutic to the subject.

24. (canceled)

25. The isolated nucleic acid molecule of claim 1, wherein
the first polynucleotide sequence encodes a polypeptide comprising two homology domains of a luminal domain of a LAMP protein, and an antigenic domain comprising HER2 extracellular domain (collectively “HER2-LAMP”), wherein the antigenic domain is placed between the two LAMP homology domains.

26. (canceled)

27. (canceled)

28. (canceled)

29. (canceled)

30. (canceled)

31. (canceled)

32. (canceled)

33. (canceled)

34. (canceled)

35. (canceled)

36. (canceled)

37. (canceled)

38. (canceled)

39. (canceled)

40. (canceled)

41. (canceled)

42. (canceled)

43. (canceled)

44. (canceled)

45. (canceled)

46. (canceled)

47. (canceled)

48. (canceled)

49. (canceled)

50. (canceled)

51. (canceled)

52. The isolated nucleic acid of claim 1, wherein the isolated nucleic acid comprises DNA, mRNA, or self-amplifying RNA.

The application's sequence listing, which the Patent Office published only in electronic form, follows.

SEQUENCE LISTING (882 sequences)

SEQ ID NO: 1 - protein, 417 aa, Homo sapiens
MAAPGSARRPLLLLLLLLLLGLMHCASAAMFMVKNGNGTACIMANFSAAFSVNYDTKSGPKNMTFDLPSDATVVLNRSSCGKENTSDPSLVIAFGRGHTLTLNFTRNATRYSVQLMSFVYNLSDTHLFPNASSKEIKTVESITDIRADIDKKYRCVSGTQVHMNNVTVTLHDATIQAYLSNSSFSRGETRCEQDRPSPTTAPPAPPSPSPSPVPKSPSVDKYNVSGTNGTCLLASMGLQLNLTYERKDNTTVTRLLNINPNKTSASGSCGAHLVTLELHSEGTTVLLFQFGMNASSSRFFLQGIQLNTILPDARDPAFKAANGSLRALQATVGNSYKCNAEEHVRVTKAFSVNIFKVWVQAFKVEGGQFGSVEECLLDENSMLIPIAVGGALAGLVLIVLIAYLVGRKRSHAGYQTI

SEQ ID NO: 2 - protein, 410 aa, Homo sapiens
MVCFRLFPVPGSGLVLVCLVLGAVRSYALELNLTDSENATCLYAKWQMNFTVRYETTNKTYKTVTISDHGTVTYNGSICGDDQNGPKIAVQFGPGFSWIANFTKAASTYSIDSVSFSYNTGDNTTFPDAEDKGILTVDELLAIRIPLNDLFRCNSLSTLEKNDVVQHYWDVLVQAFVQNGTVSTNEFLCDKDKTSTVAPTIHTTVPSPTTTPTPKEKPEAGTYSVNNGNDTCLLATMGLQLNITQDKVASVININPNTTHSTGSCRSHTALLRLNSSTIKYLDFVFAVKNENRFYLKEVNISMYLVNGSVFSIANNNLSYWDAPLGSSYMCNKEQTVSVSGAFQINTFDLRVQPFNVTQGKYSTAQDCSADDDNFLVPIAVGAALAGVLILVLLAYFIGLKHHHAGYEQF

SEQ ID NO: 3 - protein, 416 aa, Homo sapiens
MPRQLSAAAALFASLAVILHDGSQMRAKAFPETRDYSQPTAAATVQDIKKPVQQPAKQAPHQTLAARFMDGHITFQTAATVKIPTTTPATTKNTATTSPITYTLVTTQATPNNSHTAPPVTEVTVGPSLAPYSLPPTITPPAHTTGTSSSTVSHTTGNTTQPSNQTTLPATLSIALHKSTTGQKPVQPTHAPGTTAAAHNTTRTAAPASTVPGPTLAPQPSSVKTGIYQVLNGSRLCIKAEMGIQLIVQDKESVFSPRRYFNIDPNATQASGNCGTRKSNLLLNFQGGFVNLTFTKDEESYYISEVGAYLTVSDPETIYQGIKHAVVMFQTAVGHSFKCVSEQSLQLSAHLQVKTTDVQLQAFDFEDDHFGNVDECSSDYTIVLPVIGAIVVGLCLMGMGVYKIRLRCQSSGYQRI

SEQ ID NO: 4 - protein, 478 aa, Homo sapiens
MGRCCFYTAGTLSLLLLVTSVTLLVARVFQKAVDQSIEKKIVLRNGTEAFDSWEKPPLPVYTQFYFFNVTNPEEILRGETPRVEEVGPYTYRELRNKANIQFGDNGTTISAVSNKAYVFERDQSVGDPKIDLIRTLNIPVLTVIEWSQVHFLREIIEAMLKAYQQKLFVTHTVDELLWGYKDEILSLIHVFRPDISPYFGLFYEKNGTNDGDYVFLTGEDSYLNFTKIVEWNGKTSLDWWITDKCNMINGTDGDSFHPLITKDEVLYVFPSDFCRSVYITFSDYESVQGLPAFRYKVPAEILANTSDNAGFCIPEGNCLGSGVLNVSICKNGAPIIMSFPHFYQADERFVSAIEGMHPNQEDHETFVDINPLTGIILKAAKRFQINIYVKKLDDFVETGDIRTMVFPVMYLNESVHIDKETASRLKSMINTTLIITNIPYIIMALGVFFGLVFTWLACKGQGSMDEGTADERAPLIRT

SEQ ID NO: 5 - protein, 197 aa, Homo sapiens
MSRLSRSLLWAATCLGVLCVLSADKNTTQHPNVTTLAPISNVTSAPVTSLPLVTTPAPETCEGRNSCVSCFNVSVVNTTCFWIECKDESYCSHNSTVSDCQVGNTTDFCSVSTATPVPTANSTAKPTVQPSPSTTSKTVTTSGTTNNTVTPTSQPVRKSTFDAASFIGGIVLVLGVQAVIFFLYKFCKSKERNYHTL

SEQ ID NO: 6 - protein, 406 aa, Mus musculus
MAAPGARRPLLLLLLAGLAHGASALFEVKNNGTTCIMASFSASFLTTYETANGSQIVNISLPASAEVLKNGSSCGKENVSDPSLTITFGRGYLLTLNFTKNTTRYSVQHMYFTYNLSDTEHFPNAISKEIYTMDSTTDIKADINKAYRCVSDIRVYMKNVTVVLRDATIQAYLSSGNFSKEETHCTQDGPSPTTGPPSPSPPLVPTNPTVSKYNVTGNNGTCLLASMALQLNITYLKKDNKTVTRAFNISPNDTSSGSCGINLVTLKVENKNRALELQFGMNASSSLFFLQGVRLNMTLPDALVPTFSISNHSLKALQATVGNSYKCNTEEHIFVSKMLSLNVFSVQVQAFKVDSDRFGSVEECVQDGNNMLIPIAVGGALAGLVLIVLIAYLIGRKRSHAGYQTI

SEQ ID NO: 7 - protein, 411 aa, Danio rerio
MARAAGVCWTLLMGCVFAAHAVTFEVTDGNSTCIKGELNASFSISYNTTNGTSVSVFALPASASVSERSSCGSAAVPPELALVFGDTHTHTLSLLFSRDQRLYRVSNISLQYNLSDGDIFPQSSSAGVQSVMASVSELMSARLNSTYRCVSSSSISLSAAVNLTLSGVQMEAYMSSANLSADESVCSADQPSTTVAPPPSTTTSPPPIPPVPERGNYSVTDGNGTVCVLALMGLQLNITHTTTQNQSVSELMNLQPNQTTVSGSCGVTESSLRLSDETTNLTFSFTMNSTTQKYYLSAVSVSALWPDMSVVFEAGNTSLSALQCSVGRSYVCSAQQMLSVTPVFSINTFRLQLQPFNITANRFSTAEECRVDQENMLIPIIVGAALAGLVLIVLVAYLIGRKRTHAGYQTI

SEQ ID NO: 8 - protein, 417 aa, Xenopus laevis
MSWRQVKMPVYWMAVMLLIGVVQVATAVQFEVKDGKTNITCILADLSINFSVSYNVSSKMELATFVLPSEAVTNINKSSCGVENTTAPVLAIQFGSNHSLSIHFARNNTRYEVAELVMSYNLSDKIIFPNASENGTKTVSTNKTAVLAENDTVYKCMNPHLIRMDNANATFHDIRLEAYLKQSNFSQKVSTCSEDITPTSAPAPVTTTAPVPAPVPDPPVVQYSVNRSSEPCLLAKVGLQMNITYTTKDGKNGSYVFNIESKGVTVDGNCTNTTAYLSLSTGSIDLRFNFTLNSSLEVFYLDGVSLSTGLPADANDTHFEAANSSLNYMQTNVHKSFKCNSKQTLQITDPFTVNTYHLQVQAFNSDNTFASAVECSLDENGMLVPIVVGAALAGLVLIVLIAYLIGRKRSHAGYQTI

SEQ ID NO: 9 - protein, 417 aa, Pan troglodytes
MAAPGSARRPLLLLLLLLLLGLVHCASAAMFMVKNGNGTACIMANFSASFSVNYDTKSGPKNMTFDLPSDATVVLNRSSCGKENTSDPSLVIAFGRGHTLTLNFTRNATRYSVQLMSFVYNLSDTHLFPNASSKEIKTVESITDIRADIDKKYRCVSGTQVHMNNVTVTLHDATIQAYLSNSSFSRGETRCEQDRPSPTTAPPAPPSPSPSPVPESPSVDKYNVSGTNGTCLLASMGLQLNLTYERKDNTTVTRLLNINPNKTSASGSCGAHLVTLELHSEGSTVLLFLFGMNASSSRFFLQGIQLNTTLPDARDPAFKAANGSLRALQATVGNSYKCNAEEHVRVTKAFSVNIFKVWVQAFKVEGGQFGSVEECVLDENNMLIPIAVGGALAGLVLIVLIAYLVGRKRSHAGYQTI

SEQ ID NO: 10 - protein, 415 aa, Macaca mulatta
MAAPGSARRSLLLLLLLLLGLTHCASAAMFIVKNGNGTACIMANFSAAFSVNYDTKSGPKNMTFDLPSDAKVVLNSSSCGKENTSDPSLVIAFGRGQTLTLNFTRNATRYSVQLMSFVYNLSDTHLFPNASSKEIKTVESITDIRADIDKKYRCVSGTQVHMNNVTVTLHDATIQAYLSNSSFSREETRCEQDRPSPTTAPPAPPSPSPSPVPESPSVDKYNVSGTNGTCLLASMGLQLNLTYERKDNTTVTRLLNINPNKTLASGSCGAHLVTLELHSEGSTVLLFQFGMNASSSRFFLQGIQLNTTLPDARDPAFKAANSSLRALQATVGNSYKCNAEEHVRVTKAFSVNIFKVWVQAFKVEGGQFGSVEECLLDENNMLIPIAVGGALAGLVLIVLIAYLVGRKRSHAGYQT

SEQ ID NO: 11 - protein, 413 aa, Canis lupus
  source 1..413: note = subspecies "familiarus"
MAAFGGARPRPLLLLLLAGLVHGAAAVFVVKDANGTACIMANFSAAFLASYETRSGPKNVTFDLPSDAVVLNSSSCGKENTSDPSLMIAFGKGHGLTLNFTRNATRYSVQLMSFIYNLSDTQIFPNASSKETKTVESATDIRADINKKYRCVSNTQIHMHNVTVTFHDVTIQAYLANSNFSKEETRCEQDGPFPTTAPPPPPHPSPSPAPESPSVHKYNVSGANGTCLLASMGLQLNVTYKKKDNTTVVKVVSINPNKTTAGGSCGAQLVTLELRSESVTLLAFQFGMNASTSRFFLQGIQLNMTLPDARDPTFKAGNNSLRALQATIGNSYKCNAGEHVQVTEAFSVNIIKVWVQAFQVQGDKFGSVEECQLDENSMLIPIAVGGALAGLVLIVLIAYLIGRKRSHAGYQTI

SEQ ID NO: 12 - protein, 417 aa, Oryctolagus cuniculus
MEAPGGARRPLLLLLLLGLVHGASAVFVVRNSNGTACIMANFSAVFSVIYESKSGYKNASFELPATAEVQNTSSCGRENTSNPSLQIAFGRGHVLALNFTRNATLYSVPLLSFVYNLSDSDLFPNASSKDIKTVGSTTDIKADIDKRYRCVSDSKVPMGNVTVTLQDATIQAYLWNNSFSQAESRCRQDMPSPTTAPPAPPVPPSPPSPSPPPKPESPSVSRYNVSDGNATCLLASMGLQLNLTYVHRDNATVTRVFNINPNKTKPSGHCGAQQVTLELQSERSTVLVFQFGMNASSGQYFLQGVLLNTTLPDAREPAFSASNSSLRALQATLGNSYKCNSEEHVRVTPAFSLSIFKVWVQAFQVKGDKFGSVEECLLDQDSMLIPIAVGGALAGLVLVVLIAYLIGRKRSHAGYQT

SEQ ID NO: 13 - protein, 409 aa, Bos taurus
MAAPGGARRRPLLLLLFAGLVHGASAVFVVKNGNGTACIMADFSATFLTSYDTRSGPQNKSFELPAGAEVSNSSSCGKENASDSSLVITFGRGHTLTLIFTRNATRYEVQLMRFAYNLSDTDTFPNSSSTGVKTVESATDIKADINKTYRCVSETQVNMDNVTVTLRDAAIQAYLSSSNFSREETRCEQDLPTPTTPPQPAPTPAPASPAVFRYNVSGSNGTCLLASMGLQLNVTYRRVDNKTVTREFNVNPNKTTFGGNCSATLATLELHSENLLLLALQFVMNESSSRVFLQGVQLNLTLPDAKEGSFTATNSSLRALQATAGNSYKCNAEQRLRVTSSFSLNMFRVWLQAFRVDGDKFGPVEECQLDENSMLIPIAVGGALAGLVLIVLLAYLIGRKRSHAGYQTI

SEQ ID NO: 14 - protein, 407 aa, Rattus norvegicus
MAAPGARRPLLLLLLAGLAHSAPALFEVKDNNGTACIMASFSASFLTTYDAGHVSKVSNMTLPASAEVLKNSSSCGEKNASEPTLAITFGEGYLLKLTFTKNTTRYSVQHMYFTYNLSDTQFFPNASSKGPDTVDSTTDIKADINKTYRCVSDIRVYMKNVTIVLWDATIQAYLPSSNFSKEETRCPQDQPSPTTGPPSPSPPLVPTNPSVSKYNVTGDNGTCLLASMALQLNITYMKKDNTTVTRAFNINPSDKYSGTCGAQLVTLKVGNKSRVLELQFGMNATSSLFFLQGVQLNMTLPDAIEPTFSTSNYSLKALQASVGNSYKCNSEEHIFVSKALALNVFSVQVQAFRVESDRFGSVEECVQDGNNMLIPIAVGGALAGLVLIVLIAYLIGRKRSHAGYQTI

SEQ ID NO: 15 - protein, 414 aa, Gallus gallus
MGGAARAVLLGFLQASSSFDVRDSTGKVCIIANLTVAFSVEYKSSGQKQFAHFFLPQNATSQSHSSCGEGNTSHPILALSFGAGHLISLNFSKTLDKYQVEELTFHYNLSDETLFPNATEGKVMVATQKSVIQARIGTEYRCINSKYVRMKHVNITFSNVTLEAYPTNDTFSANKTECREDMVSTTTVAPTTPKHATSQVPTTSPAPTAAPSSPAVGKYNVTGANGTCVLASMGLQLNITYVKKDEKMGLDLLNFIPHNTSASGMCESTSAFLNLAFEKTKITFHFVLNASSEKFFLQGVNVSTTLPSEAKAPTFEASNDSMSESRATVGNSYKCSAEENFQVTDKALVNVFNVQVQAFKVDGDKFGAMEECQLDENNMLIPIIVGAALAGLVLIVLIAYLIGRKRSHAGYQTI

SEQ ID NO: 16 - protein, 413 aa, Sus scrofa
MAAPGGAWRRPLLLLLLLLGLARGASAVFVVSDGNGTACIMADFAAAFEISYDSRSGAKNTTFSLPASAQVLNSSSCGKENTSDSSLVIAFGRGHTLTLSFTRNATRYSVQLMTLVYNLSDAEFFPSASSKGTKTVAASTDIRADLNTKYRCVSNSQVHLLNVTVTLGNATIQAYLANNSFSQQETRCEQDKPSPPTPTAPPTPTPTPAPTSPVVSRYNVSGANGTCLLASMGLQLNVTYRTKDNTTVTRGLNINPNKTTFGGSCSAQLVTLELQGESLRLLALQFALNTSSSRVFLQGVQLNMTLPDARDPSFSAANSSLRALQATAGNSYKCRSEQRLQVTEAFALNVFQVRVQAFRVDGDKFGPAEECQLDENSMLIPIAVGGALAGLVLVVLMAYLVGRKRSHAGYQTI

SEQ ID NO: 17 - protein, 422 aa, Monodelphis domestica
MAEPGGARTPQRLLLLLLGLIHVASSIFVVKNGTGTACIMANFSATFSMNYTTKSGLESTTFRLPQNASVMNSSSCGKENTSNPILEIGFGGGHTLTMNFSSTTQSYQVELLSFSYNLSDATLFPNASKGSEESSVKSKTDIQADIHKKYRCVSSNRITMSNVTIVLSDVTIQAYLSNNTFSKEETRCSQDTPSPSPVPTTHPTTIPVPTPTPTRPPTPAEIPPIFKYNVSDANGTCLLASMGLQLNITYAKKDNSSARIIWNINPNKTVAGGSCSPQVAILELQTENSTLAFSFGMNATTSKFFLREIRFHKFFPDAKDPAFGAVNSSLKELQATVGNSYKCNAEENVHVTDGFSVNIFRVRVQAFKVEGDKFGSVEECLLDENNMLIPIAVGGALAGLVLIVLIAYLIGRKRSHAGYQTI

SEQ ID NO: 18 - protein, 415 aa, Meleagris gallopavo
MARALLAAVLLGFLQASSSFDVRDSTGKVCIIANLTVAFSVEYKSNGQKQFAHFFLPQNATSQSHSSCGEGNTSHPILALSFGAGHLLSLNFSKTLDKYQVEELTFHYNLSDETLFPNASEGKVMEVTQKSVIQARIGTEYRCINSKYIYIRHVNITFSNVTLEAYPTNGTFSTNKTECSEDMVSTTTVAPTTPKHITSQVPATSPAPTAAPSNPAVGKYNVTGANGTCVLASMGLQLNITYLKKDGKTGLDLLNFVPHNTNASGTCENTSAFLNLAFEKTKITFHFVLNASSEKFFLQGVNVSTTLPSEAKAPMFEASNDSMSELRATVGNSYKCSAEENLQVTDKALVNVFNVQVQAFKVDGDKFGAVEECQLDENNMLIPIIVGAALAGLVLIVLIAYLIGRKRSHAGYQTI

SEQ ID NO: 19 - protein, 415 aa, Taeniopygia guttata
MARGLLAAAALLGFLQASSSFEVKDSSGKVCILADLTVAFSVEYKTNVQKEFVHFFLPQNASVDSQSSCGKDNASHPILVLDFGGGHSLSLNFSESADKYQVEELVFHYNLSDATLFPNSSTGGMKTVSHKSIIQAHMGTQYRCINSKHINMKNVNVTFSNVTLEAYLTNGTLSVNKTECAEDRVSTTTMVPTTPKQTTSQSPTTGPAPTSPPNPTVGKYNVTGPNGTCVLAYMGLQLNITYQQKDEKMGLDLLNFVPHNTTSSGRCDNTSALLNLTFEKTRVIFQFALNATAEKFFLQGVSVSTTLPSEAKNPKFEATNNSMSELRASVGNSYKCSSEENLQVTDQALVNVFNVQVQIFKIDGDKFGPVEECQLDENNMLIPIIVGAALAGLVLIVLIAYLIGRKRSHAGYQTI

SEQ ID NO: 20 - protein, 418 aa, Anolis carolinensis
MVSSSSCRRGLLLAAVLLGFLQASSTFEVRDKTGKICILANFSAEFTVDYSTKAKVERKTFQLPSSAHINKESSSCGKEKETSQVLVVEFGTGNSLTFTFEKSNDFYHVSNLTFSYNLSDSSFFPNSSGGQREVSRAGDIQANINTTYRCRSNHRVNMTNVTVLFSNVTLEAYLPNNAFSKNDSVCAEDKTSTVAPPITTHIPTTTSLAPPTPPPTDTPKIGRYNVTGLHGICLLATMGLQVNVTYSTKNKTSKSELLNLPPTAEVSGTCENSSITLNLTSESTSLSFQFSQNTSTEKYFLQGIIVTANLPPEATEKNISYSNHTLNALKTSVGKSYKCIAEESIWISGKAAVNIFNIQLQAFKIPGDKFGAVEECQLDENNMLIPIIVGAALAGLVLIVLIAYLIGRKRSHAGYQTI

SEQ ID NO: 21 - protein, 418 aa, Oryzias latipes
MKSFPSFVALFIVCSAVLADTQAVVTLEVKEGNSTCIKAEFSAVFSITYNTTNDTRTVSVFLPNSTTVDSANSSCGSNGSTPGLMAKFGPGHYFGMNFSTNGSLYSVDTLFLRYNLSDASLFPEANSSGPVDFELSASVGIWAPTNTTYRCLSPTTITITRPSVTFSEMKLEAYMPGNDFSPAERVCAADQTTTGAPTTTTSAATPTTPSPTPAGTPEQGSYSVKNASGTVCLMAKMGVQLNVSYFSQSQNKTVQELLNLTPNLTSSSGLCGGTNATLVLAQEETTVLSFLFTVNSTSNKYHLSGITLQANWTDMMSPFSASNTSLDYLRSSLGHSYMCNAEQTLFVVSTFSINMFELQVQPFGVTSTQFASAEVCQIDQDQMLIPIIVGAALAGLVLIVLIAYLIGRKRSHAGYQTI

SEQ ID NO: 22 - protein, 420 aa, Takifugu rubripes
MKRSHALVVLIIAWFSLSGCIQAVSLEVKEGNSTCIKANLSAYFSITYNTSSSTRTAQFILPDSATVDPDSSTCGGNGSSPWLVAVFGAGHALGLGFSTNGSFYSVANLTLQYNLSDASVFPDANSSGVVTVVSSSVGIWAAVNTTYRCLSSVLFQVGGATVTFSDMRLEAYMPGNDLSPRESFCAADQTTTAPPTTTAAPTTTAATTMAPPAPTPPGTPVRGTYSVVNGNDTTCLLAQMGLQLNVSYFSRSQNKTVQSLVNLTPNLTNSTGSCEKGSATLILTQQTTILIFTFSLNSTSSKYHLSGLSLQANWSDMAAAFSASNASLSYLRSTFGHSYMCNAEQILAVTPVFSLNTFSLQIQPFGVTTNQFAAAEECQMDQDQMLIPIIVGASLAGLVLIVLIAYLIGRKKSHAGYQTI

SEQ ID NO: 23 - protein, 419 aa, Salmo salar
MTRTCPFVVGIACFAILGCVTVVQSQVTLEVTEGNSTCIKAELSASFSITYDTANGTRTVMVPLPGSAVVGVASSCGGDGRSPWLVALFGDGHALGLGFSSNDSLYSVAKLTLQYNLSDVSNFPEANSTDVVTVETTSVGMVARVNTTYRCISASPVIVGGATVTFSNVTMEAFMTGEDLSPNESVCTADQSFTTAPPPPPSTTTAAPAPVPTPPGTPSQGSYSVSNSNGTVCLLARMALQLNISHFSASQNKTIQEVVNLLPNQTTSSGSCDPTSATLVLTQANATNLSFLFTLNSTSNRYHLTGLSVVAAWSDMTAPFNTSNSSLDYQRGSLGRSYMCISEQTLVVDQNFSLNTFQLQVQPFGITRGQFAQAEECQLDQDNMLIPIVVGAALAGLVLIVLIAYLIGRKRSHAGYQTI

SEQ ID NO: 24 - protein, 247 aa, Oreochromis niloticus
MVQICRVQSWFVGVTPLLIFATVLHQGFATVAPPTPAPHKEPGRPERGYYNVTNHNGTICLMAYMGLQLNISYNSTSQKKVVQDVMNLQPNLTKHSGLCDSDIASLNLTVDAVKTNLTFVFTMNSTSNKYHLSEVTVSAAWPEMKEPVSVHNSSLDYLRGTVGYSYFCRDEQTLNVAQNLSINTFQLQVQPFAVKGDQFGAAEECQLDEDDMLIPIVVGAALAGLVVIVLLAYLIGRKRSHAGYQSI

SEQ ID NO: 25 - protein, 415 aa, Mus musculus
MCLSPVKGAKLILIFLFLGAVQSNALIVNLTDSKGTCLYAEWEMNFTITYETTNQTNKTITIAVPDKATHDGSSCGDDRNSAKIMIQFGFAVSWAVNFTKEASHYSIHDIVLSYNTSDSTVFPGAVAKGVHTVKNPENFKVPLDVIFKCNSVLTYNLTPVVQKYWGIHLQAFVQNGTVSKNEQVCEEDQTPTTVAPIIHTTAPSTTTTLTPTSTPTPTPTPTPTVGNYSIRNGNTTCLLATMGLQLNITEEKVPFIFNINPATTNFTGSCQPQSAQLRLNNSQIKYLDFIFAVKNEKRFYLKEVNVYMYLANGSAFNISNKNLSFWDAPLGSSYMCNKEQVLSVSRAFQINTFNLKVQPFNVTKGQYSTAQECSLDDDTILIPIIVGAGLSGLIIVIVIAYLIGRRKTYAGYQTL

SEQ ID NO: 26 - protein, 415 aa, Xenopus laevis
MGDTGAMERCACPAAVLLLSLVLMGATAFEVEIKDDKNATCIYAKLSVNITVQYETDTSSSKNITFPVPSDVTTNGSSCGSDGKAPLLVINFGNSQSWSLNFTRNNSTYSGSALIFTYNTNDTILFPDALRKGLISSTAMFLGPVPLNSTYKCISREVVVSENVTQIIYDVKLEAFMANGTLGKEIICDADKPSPVPSPTQPSTTASTAIPAPTSKPLDKPTMGNYTVSDASGICLLASMGLQINTSLLSEGKNIWRPFNIDPLGIKTNGTCTNQTGTLILTENRTIIEFTFALKNKNHFYLEEVNITLINGSAFSSRQNQNLSTWEASVDSSYMCHKEQQIKVSEDLFINAFDVRVQPFGVNNGTFATAEDCFADQNFIVPIVVGAALGVLVVLVMVAYFIGRRKQSSAGYEQM

SEQ ID NO: 27 - protein, 355 aa, Danio rerio
MAVRGFLPLLFILLSGIVHADDMMTSPLPSTAELKTANLPLVIQTTSSTTSTTTTSRPSSTSTHSTLTTEPAAKTTTARTTVTTSAPTSTQSTSSSSTSATVTTLAPTTTGHNTTNSTTEPPTTTGHNTTNSTTDAPTTTHTNATVAPTPPPTTPSVPKPTVGNYSVKTDNVSDCLLAKMGLQFSFKISGNASLQTVNLDPNVTKVNGTCGSGGSDSSLFLTSKDITVHFVFTNDSQKFRLHALTLTVDLGNGNIFNDSNTNLSLWEASVGSSYMCRKEQSYNISDKLTLNTFELQVQPFDVKKNSFSTAHECSLDDTSLLIPIIVGAALAGLIFIVVIAYVIGRRRTYVGYQTL

SEQ ID NO: 28 - protein, 411 aa, Papio anubis
MVCFRLFPVPGSGLVLVCLVLGAVQSYALELNLTDSGKATCLYAKWQMNFTVRYETTNKTYKTVTISDRGTVTYNGSICGDDQNGPKIAVQFGPGFSWIANFSKAASTYSIDSISFSYNTGDNTTFPDAEDKGIITVDELLAIKIPLNDLFRCNSLSTLEKNDVVQNYWDVLVQAFVQNGTVSTNEFLCDEDKTSTVAPTIHTTVPSPTTTPTPKEKPEAGTYSVNNGNDTCLLATMGLQLNITQDKVASVININPNTTHSTGSCRSHTALLRLNSSTIKYLDFVFAVKNENRFYLKEVNVSMYLVNGSVFSIANNNLSYWDAPLGSSYMCNKEQTVSVSGAFQINTFDLRVQPFNVTQGKYSTAEECSADSDLNFLIPVAVGVALGFLIIVVFISYMIGRRKSRTGYQSV

SEQ ID NO: 29 - protein, 410 aa, Macaca mulatta
MVCFRLFPVPGSGLVLVCLVLGAVQSYALELNLTDSGKATCLYAKWQMNFTVRYETTNKTYKTVTISDRGTVTYNGSICGDDQNGPKIAVQFGPGFSWIANFSKAASTYSIDSISFSYNTGDNTTFPDAEDKGIITVDELLAIKIPLNDLFRCNSLSTLEKNDVVQNYWDVLVQAFVQNGTVSTNEFLCDEDKTSTVAPTIHTTVPSPTTTPTPKEKPEAGTYSVNNGNETCLLATMGLQLNITQDKVASVININPNTTHSTGSCRSHTALLRLNSSTIKYLDFVFAVKNENRFYLKEVNVSMYLVNGSVFSIANNNLSYWDAPLGSSYMCNKEQTVSVSGAFQINTFDLRVQPFNVTQGKYSTAQDCSADDDNFLVPIAVGAALAGVLILVLLAYFIGLKRHHAGYEQF

SEQ ID NO: 30 - protein, 364 aa, Pan troglodytes
  SITE 200: note = Xaa can be any naturally occurring amino acid
MVCFRLFPVPGSGLVLVCLVLGAVRSHALELNEADSAINCSKCKTVTISDHGTVTYNGSICGDDQNGPKIAVQFGPGFSWIANFTKAASTYSIDSISFSYNTGDNTTFPDAEDKGILTVDELLAIKIPLNDLFRCNSLSTLEKNDVVQHYWDVLVQAFVQNGTVSTNEFLCDKDKTSTVAPTVHTTVPSPTTTPTRIPPXVASVININPNTTHSTGSCRSHTALLRLNSSTIKYLDFVFAVKNENRFYLKEVNISMYLVNGSVFSIANNNLSYWDAPLGSSYMCNKEQTVSVSGAFQINTFDLRVQPFNVTQGKYSTAEECSADSDLNFLIPVAVGVALGFLIIVVFISYMIGRRKSRTGYQSV

SEQ ID NO: 31 - protein, 411 aa, Canis lupus
  source 1..411: note = subspecies "familiarus"
MVCFRLSPAPGSGLVLLCLVLGAVSSYALEVNVTDSEKATCLYAKWQMNFTIQYNTTSKNFKTATISDFSTATYNGSVCGNDQNNPKIVVQFGSGFSWIVNFTKKESAYLIDSISFSYNLSDNATFPDAKEKGILTVHDLVGFRIPLNNIFRCNSLSTLEKNGVVQYYWDVHVQAFVQNGTVSTKEFLCEKDKTSTTVVPTISTTTPSPTTTPTPKEKPEVGSYSVNNSNGTCLLATMGLQLNITHNKVASVININPNTTDFTGSCQPQTALLRLNSSNIKYLDFVFAVKNENRFYLKEVNVSMYLVNGSVFSIANNNLSYWDAPLGSSYMCNKEQTVSVSGAFQINTFDLRVQPFNVMEGKYSTAQECSLDDDTILIPIIVGAGLSGLIIVIVIAYLIGRRKSYAGYQTL

SEQ ID NO: 32 - protein, 417 aa, Equus caballus
MVCFRLSPVPGSGLVLLCLVLGAVSSYALELNLTDSEKALCLYAKWQMNFTIPYETTSKSYKTVTISNFGTPTYNGSICGDNQNGSRIAVQFGSGFSWIVNFTKSVSVYSIDSISFSYNTGDNTTFPDAKDKGILTVNESVAFKIPLNDIFRCNSLSSLVKNGVVQNYWDVHVQAFVQNGTVSTNEYLCEKDNTTTTVAPIVPTTVPSPTTTSSPTTTPSPKEKPDVGSYLVKNGSDTCLLATMGLQLNVTHDKVASVININPNVTGYSGSCHPQTALLRLNSSNIKYLDFVFAVKNENRFYLKEVNVSMYLANGSVFSFANNNLSYWDAPLGSSYMCNKEQTVSVSGEFQINTFDLRVQPFNVKDGKYSTAQDCRADDDNFLVPIAVGAALAGVLILVLLAYFIGLKRHHAGYEQF

SEQ ID NO: 33 - protein, 407 aa, Bos taurus
MVCFRLAPVPGSGFLLLCLVLGAVSSYALELNLTDSSNATCLYAKWQMNFTIRYETTDKHNKTVPISDLGAATYNGSFCGDDQNGPKIAVQFGSGFSWIVNFTKEAASPSTYLVDTISFSYNTNDNKTFPDAKEKEVFTVNNRVALKIPLNDIFRCNSLSTLENRDVVQHYWDVHVQAFVQNGTVSTTEFLCDKDKTVTTAVPIVPTTLPSPTKPVVGSYSVVNSNGTCLLATMGLQLNITHDKVASVFNINPNTTNATGSCQPQTALLRLSSSNIKYLDFVFAVKNENRFYLKEVNVSMILVNGSVYSISNTNLSYWDAPLGSSYMCNKEQTVSVSGAFQINTFDLRVQPFSVTEGKYSTAQECSLDDDTILIPIIVGAGLSGLIIVIVIAYLIGRRKSYAGYQTL

SEQ ID NO: 34 - protein, 411 aa, Sus scrofa
MVCFRLSPVPGSGLLMLCLVLGAVSSYALELNLTNSEKATCLYAKWQMNFTIRYETTNNSHKTVSISDFGAATYNGSFCGDDHNDPQIVMQFGSGFSWIVNFAKESSSYLINSISFSYNTSDTTTFPDAKKKGVLTVNDSVGFQVPLNDIFRCNSLSTLEKDNVVQHYWDVHVQAFVQNGTVSTKEFLCDKDKTLTTTVPVIPTSVPSPTTTPTPKEKPETGSYSVTSSNGTCLLANMGLQLNITQDKVASVININPNTTNATGNCHSKTALLRLSGSNIKYLDFVFAVKNDNRFYLKEVNVSVYLVNGSVFSIANNNLSYWDAPLGSSYMCNKEQTVSVSGAFQINTFNLRVQPFSVMEGKYSTAQDCSADDDNFIVPIAVGAALAGVLILVLLAYFIGLKRHHAGYEQF

SEQ ID NO: 35 - protein, 408 aa, Ovis aries
MVCFRLAPVPGCGFLLFCLVLGTVSSYALELNLTDSSKATCLYAKWQMNFTIRYETTDKHNKTVTISDFDAAAYNGSVCGDDQNGPKIAVQFGSGFSWIVNFTKEASSTSTYLVDSISFSYNTNDNATFPDAKEKGVFTVNNRVALKIPLNDIFRCNSLSTLEKSDVVQHYWDVHVQAFVQNGTVSTTEFLCDKDKTVTTAMPIVPTTAPSPTKPVVGSYSVVNSNGTCLLATMGLQLNITHDKVASVFNINPNTTNATGSCQPQTALLRLSSSNIKYLDFVFAVKNENRFYLKEVNVSMILVNGSVYSISNTNLSYWDAPLGSSYMCNKEQTVSVSGALQINTFDLRVQPFSVTEGKYSTAEECSADSDLNFLIPVAVGVALGFLIIVVFISYMIGRRKSRTGYQSV

SEQ ID NO: 36 - protein, 411 aa, Rattus norvegicus
MRLLSPVTGSKLVLLFLFLGAVRSDALKLNLTDSKGTCLYAEWEMNFTITYEALKVNETVTITVPDKVTYNGSSCGDDKNGAKIMIQYGSTLSWAVNFTKEASQYFINNITLSYNTNDTKTFPGAVPKGILTVIIPVGSQLPLGVIFKCSSVLTFNLSPVVQHYWGIHLQAFVQNGTVSKHEQVCKEDKTATTVAPIIHTTVPSPTTTLTPTSIPVPTPTVGNYTISNGNATCLLATMGLQLNITEEKVPFIFNINPATTNFTGSCQPQTAQLRLNNSQIKYLDFIFAVKNEKRFYLKEVNVNMYLANGSAFHVSNNNLSFWDAPLGSSYMCNKEQVVSVSRTFQINTFNLKVQPFNVTKGEYSTAQDCSADEDNFLVPIAVGAALGGVLILVLLAYFIGLKRHHTGYEQF

SEQ ID NO: 37 - protein, 570 aa, Ornithorhynchus anatinus
MAMKNFTLQQERDTSVALIIRTYVRAFLKVYTKVPKPQRCHNQWQSLNIEGIEGIEIVKGSKWRSALETIITIQVKRKSQVQKYHPFSLHSECQKTNQEGTGGVATVIADECLLWPSIPFSTLAQKVNLGSCEAFSIIGYSVFALFIYLKPNMLDFIELAELMLSTETQLLEPTRVCCGICQSYALEINLTDSKNATCLYSKWQMTFTINYETTGNETKNVTVTVPENVTYDGSSCGDNQTVPQIAVQFGLGYSWHLNFTKKENNSYSFDTIVFTYNTSDNETFPEAKEKGQVLSVFEFRYARIPLNKIFRCHSEESLIGDKATHHYWETVVQAFIQNGTISKEEFICSKDRASTTVAPVTTQVVPSTTATPVPQDKPYPGKYAVKNGNDTCLLATMGLQLNVTQNKVNSVININPNVTDFTGSCSNETAELRLSGSNVKYIDFIFAVKNGNRFYLKEVNVSISFVNASDLNVANNNLSYWDAPLGSSYMCNKEQTLALADSLQINTFNLRVQPFSVVAGKYSTAEDCSADDDNFIVPIAVGAALGGLVILVLMAYFVGRKRRATGYEQF

SEQ ID NO: 38 - protein, 425 aa, Gallus gallus
MAPPRCPAGLALLLLLLGACGFFQSYAVEVDVKDASNFTCLYAQWMMKFLIKYETNSSDYKNASLDLTSTVTHNGSICGSDTQAALLAVQFGDGHSWSINFTKNNETYRAEFITFTYNTNDTAVFPDARRQGPVTIVVKDAMHPIQLNNVFVCHHTTSLEAENVTQIFWNVTMQPFVQNGTISKKESRCYADTPTAAPTVLPTVANVTTASTTISPAPTTAPKPAENPVTGNYSLKTGNKTCLLATVGLQLNISQDKPLLINIDPKTTHADGTCGNTSATLKLNDGNRTLIDFTFIVNASASVQKFYLREVNVTLLNYQNGSVILSADNNNLSKWDASLGNSYMCRKEQTLEINENLQVHTFNLWVQPFLVKENKFSIAEECFADSDLNFLIPVAVGMALGFLIILVFISYIIGRRKSRTGYQSV

SEQ ID NO: 39 - protein, 556 aa, Taeniopygia guttata
MECREGEVTRCKQKNNLFSGINDDISGAKQAKQRQCTPQKPPKRATATLPLQRPPRGIPGPAPAAVAAAVAADRITPSGSHQTRPPEAARDERPVRDPRNRAAAPSGHWRRAGGPQRHRHHRHRRHGPAPLRRLLLRPPPPAAAAARFLGFFQSYAVEVDIKDASNATCLYADWMMRFLIKYESNSGDYKTTTLNLSSSVTHNGSVCGNDTQAALVAVQFGEGHSWSINITKNNETYQGDFITLTYNTNDTAVFPDAKRKGPITVLVRDPSRPIQLNTVFVCHNSFVIEAENTTQIFWNVTMQAFVQNGTVSKKESRCPADTPTSEPTVPPTIANVTTASTTTLSPAPTTAPKPVENPVTGNYSLKSGNKTCFLATVGLQLNVSQEKPLLININPKTTVADGACGNTTATLKLNDGNSTLIGFTFAVKNTSASVQKFYLREVNVTLLNRLNGSVISSADNSNLSKWDAFLGSSYMCRKEQTLQINENVQVHTFNLWIQPFLVEANKFATAEECIADSDLNFLIPIAVGVALGFLIILVFISYIIGRRKSRTGYQSV

SEQ ID NO: 40 - protein, 408 aa, Xenopus tropicalis
MERCACPAALLLLSLVLMGAMAFDVEIKDDKNATCIYAKLSVNVTVQYETNTSSTKNVTFSVPSEVTTNGSSCGSNGKAPILVINFGNGHSWSLNFTRNDSMYSGGALIFTYNTNDSTLFPDALKEGLISSTAAFLGPIPLNSTYKCISSEVVVSENVTQIISDVKLEAFMQNGTLGKEVSCDADKPSPTPTTNPSTTASTTTPTPTSKPLDNPTTGNYSVSDVNGTCLLASMGLQINTSLLSEGKNIWTAFNIDPTAMSKNGTCSNQTGTLILTDNSTVIEFTLALKNKNHFYLKEVNVALINGSASSTRQNQNLSAWEASVGSSYMCHKEQQIKVSEDLVINSFDVRVQLFGVKNETFATAQQCSLDDDSIVIPIVVGAALAGLIVIIVIAYLIGRRKGYSGYQTL

SEQ ID NO: 41 - protein, 404 aa, Salmo salar
MFRCAFLILFLALGNELHLSHGTEVSVNNTENKLCLYANLMVNFSVTYEVGVNKNETVIFVLPENVTTEGSTCDNTTSTLKLSFGHGHSWTVEFTKKNKTYQVDTIVFSYNLNDSSVFPNSTSKETKFVTVKSIITNVSVDTYYSCKSENVLTVESVIQTLYDVALQAFVINGSKSDTDTVCSADMTSTTVAPTTTVTSTAAPTSTPTLPTPTTGKYSIAPDVNSTACLMATFGLQIGYKQGDKEETINLVPNITEVGGACGANSSDLILTSDTITIMFTFSNDGKKFHLHALKVTVKPATGDPVIAVNNNMSIWAAAVGSSYMCNKEQTLNVTDTLTLYTFELRVQPFEVNKGEFATAHECSLDDTSILIPIIVGAALAGLILIVVIAYVIGRRKTYVGYQTL

SEQ ID NO: 42 - protein, 410 aa, Oreochromis niloticus
MKVSHATAGLVVWFVVLGCIDAVTLEVKESNTTCIKADLSASFSIIYNTTHAERTVQVLLPNSTTVDTANSTCGKDGSSPRLVAVFGSGYTLGLNFSTNGTLYQVSSLTLQYNLSDTSVFPNATISGVVTLVSASVGIEANVNTTYKCASPTVIDVATAKVNFTDMRLEAYMPGNELSPNETVCFADQTSTTPSPTTVSTTAVPTQTPPGTPQQGNYTVKDANDTICLLAKMGLQLNVSYTSQNKTVQDVLNLNPNVTNSTGSCGASSATLVLTQTQSTILTFNFTLNSTTNKYHLSGVTLIANWFDSAHFSMSNNSLNYLRSTLGYSYMCNAEQTLFVTPSFSLNTFDLQVQPFGVKSGRFATAEECQMDQNQMIIPIIVGAALAGLVLITLIAYLIGKRRSHAGYQAI

SEQ ID NO: 43 - protein, 249 aa, Takifugu rubripes
MTQIGGVQPVFLAVTVHLILATVLHQTFATVTPPVTTAVPHKEPGRPDQGDYQVTSSNGTVCFLASMGLQLNITFNSTSQNKTLQEVINIQPNRTKSSGSCDTSSALLTLTTDAEKTNLTFVFALNTTSNKYHLSEVSLSAALSDMKETFVAQNHSLDYLRGTLGFSYMCRERQTLGVTPDFAINTFQVQVQPFGVTGKQFAAAEECQLDKDDMLIPIIVGAALAALVLIVLSAYLIGRKRSHAGYQSI

SEQ ID NO: 44 - protein, 418 aa, Pan troglodytes
MPRQLSAAAALFASLAVILHDGSQMRAKAFPETRDYSQPSAAATVQDIKKPVQQPAKQAPHQTLAARFMDGHITFQTAATVKTPTTTPATTKNTATTSPITYTLVTTQATPNNSHTAPPVTEVTVGPSLVPYSLPPTITPPAHTTGTSSSTVSHTTGNTTQPSNQTTLPATLSIALHKSTTGQKPVQPTHAPGTTAAAHNTTRTAAPASTVPGPTLAPQPSSVKTGIYQVLNGSRLCIKAEMGIQLIVQDKESVSWGHRTITLSSKSLSGGCLARNEHSPHPLFLFFEKGPPSVTQAEDEESYYISEVGAYLTVSDPETIYQGIKHAVVMFQTAVGHSFKCVSEQSLQLSAHLQLKTTDVQLQAFDFEDDHFGNVDECSSDYTIVLPVIGAIVVGLCLMGMGVYKIRLRCQSSGYQRI

SEQ ID NO: 45 - protein, 416 aa, Papio anubis
MPRQLSAAAVLFASLAVILHDGSQMRAKAFPKTRDYSQPTAAATGQDIAKPVQQPANQAPHQTLAARLMDGHITFQTAATIKTPTTTPVTTKNTPTTSPIIYTLVTTQATSNNSHTAPPLTKVTVGPSLAPYSLPPTITPPAHTTGTSSSTVNHTTGNATQPSNQTTLPATLSIALHKSTTGQKPVQPTHAPGTTAAAHNTTRTAAPASTVPGSTLAPQPSSVKTGIYQVLNGSRLCIKAEMGIQLIVQDKESVFSPRRYFNLDPNATQASGNCGTRNSNLLLNFQGGFVNLTFTKDEGSYYISEVGACLTVSDPETIYQGMKHAVVMFQTAVGHSFKCVSEQSLQLSAHLQLKTTNVQLQAFDFEDDHFGNVDECSSDYTIVLPVIGAIVVGLCLVGIGVYKIRLRCQSSGYQRI

SEQ ID NO: 46 - protein, 416 aa, Macaca mulatta
MPRQLSAAAVLFASLAVILHDGSQMRAKAFPKTRDYSQPTAAATGQDIAKPVQQPANQAPHQTLAARLMDGHITFQTAATIKTPTTTPVTTKNTPTTSPIIYTLVTTQATSNNSHTAPPLTKVTVGPSLAPYSLPPTITPPAHTTGTSSSTVNHTTGNATQPSNQTTLPATLSIAPHKSTTGQKPVQPTHAPGTTAAAHNTTRTAAPASTVPGSTLAPQPSSIKTGIYQVLNGSRLCIKAEMGIQLIVQDKESVFSPRRYFNLDPNATQASGNCGTRNSNLLLNFQGGFVNLTFTKDEGSYYISEVGACLTVSDPETIYQGMKHAVVMFQTVVGHSFKCVSEQSLQLSAHLQLKTTNVQLQAFDFEDDHFGNVDECSSDYTIVLPVIGAIVVGLCLVGMGVYKIRLRCQSSGYQRI

SEQ ID NO: 47 - protein, 428 aa, Canis lupus
  source 1..428: note = subspecies "familiarus"
MSWQLSAAVALFVSLALILHYGSQIRAKMFPETVDFQPTTAATVRATAKPFLHLTNQVPSQTLAARSMDGHIASQRAATTSSSEPPTTHTTVKTLVTTSLVTANSTPSSSPIIYTLVTTIVTPNNSNTAAPVTEATIGPSADPGSLPTTSTPLAHTTRTNPSTLSHKTRKTTHFGNQTTLPATLSTSTHKSTSSHKSAQSTHAPGPTTAAHNTTQTASPATPASGPTLAPQPSSPKTGIYQVLNGSRLCIKAEMGIELMVQDTKSVFSPQRYFNIDPNATQTSGNCGSQKSNLLLNFQGGFVNLTFLKDENSYYINEVGAYLAVSNPEKIYQGMKSSVVMFETGVGHSFKCVSEQSIQLSTHLQLKTMNVQFQAFDFEDDHFGNVDECSSDYTVVLPVIGAIVLGLCAVGLIVYGIHLRRESSGYQRI

SEQ ID NO: 48 - protein, 430 aa, Sus scrofa
MSWRLSAVLVSFVSLAVFLHYGHHMKAKVFPEITDSSSPTTAATVQATAEPSLWKPTNHTPHKTLAAKSTDGHVTSQIATTVTDSETLTTHTTITTLAATSLAATNSTPSTSPTTHTLFTTLATPNTSHMAAPVTEAAISPSAGLSSLLPTIIPPAHTTGTRSSTLSPTAGKTTQPSNQTTLPATLSTSPHNSTASQKPTHPNHTPGPTTGAHNTTQTASPATIAPGPTLAPQPSSAKTGIYQVLNGSKLCIKAEMGIELTVQDTQSVFSPQRYFNIDPNTTQASGNCGSRKSKLLLNFQGGFVNLTFTKDENSYYVSGVGAYLTVSNPEKVYQGMKNAVVMFETMIGHSFKCVSEQSIQLSPHLQLNTMNVQLQAFDFEDDHFGNVDECSSDYTIVLPVIGAIVLGLCAVGLIVYGIRLKRESSEYQRI

SEQ ID NO: 49 - protein, 259 aa, Danio rerio
MTQSSRSVLLLMLSSLHCLGSSLESNPKDPSVLAEAPGQNKRDSDISLVPQMPVLQPKETAPPLVTYTIRNPQGKVCVRASFGVEFVVRENKKKYYFNLTPNSARATGYCANQKTVLSLEFSGGNLEFTFIKDGDQSYVKTVKGSLRAAPPCKNCPSKIYVGLVDNEKLFKAKNGLSFNCKSETMLILADYFRLKLVPLQIQAFDLVNGAFGKEVECWADYNKRMIPIILGAVAAAICLIAILTYVLVREHRNQGYEQL

SEQ ID NO: 50 - protein, 432 aa, Equus caballus
MAWQLSAVVVLFVSLAVILYYGSHVRANVFPEITDYSQPTTAATIQTRAQPSLSQPTNQVPHKTLATRSMDGQVTSQTAATTVNPETPVTHTTIKTAAATSLVTTNSTLSTSPITNTLLTTLATPDNTHTTTPVTEATIGPSAGPGSPPTTITTTSSAYTTGTRSSTVSHTTGKTTQLSNQTTLPATLSTSPHNSTTSQNPAHSTHTPGPTTGTCNTTQTASPTTTAPGPTLAPQPSSAKTGMYQILNGSKLCIKAEMGIQLTVQDTKSASPPQGYFNIDPNTTQVSGICGSRKSNLLLNFWGGFVNLTFTKDENSYYISEVGAYLTVSNPEKTYQGMKSPVVMFETVIGHSFKCVSEQSLELSTQLHLKTTNVQLQAFDFEDDNFGNVDECSSDYTVVLPVIGAIVLGLFAVGLIVYGVRVRREASGYQRI

SEQ ID NO: 51 - protein, 433 aa, Bos taurus
MSWQIPAVVMSFMALVAIWYYDSHYNSHMQAKVFPEITGYSSPTTGQATVKPSLLQPTNYVPHKTAAARSTDGHVTSQTVAKTSSSETLTTNTTIDVLATTSPVTTKSTLPTTPTTHTLVTTLATPNKSHVTFPVTEAKVGLSVGPSSPPVTVNPTAHTTGNRPSTASHTTGKTTQLSNQTTLPATLSTSPHNITTSQKPTQPTHTPGPTTATYNTTQTASPATIAPRPTLAPQPLSPKTGIYQVHNGSKLCIKAEMGIQLTVQDSVSVFSPQKYFNIDPNATQASGNCGSRKSNLLLNFQGGFVNLTFTKGEKSYYISEVEAYLTVSNPAKVYQGLKHAMMMFETVVGHSFKCVSEQSIQLSTYLQLKTMNVQLQAFDFEDDHFGNADECISDRNRREIPVAVGLSIAVLLAVLLTACLVTRKRPSRGYERM

SEQ ID NO: 52 - protein, 429 aa, Ovis aries
MSWQISAVVLFFVSLAVIWYYDSHMKANVFPEITGYSSPTTGQATVKPSLLQPTNHVPCNTAAAKSTDGHVTSQTVAKTSSPETLTTNTTIEVLVTTSPVTTQSTLPTTPTTHTLVTTLATPSKSHVTFPVTEAKAGLSIGPSSPPVTINPAAHTTGNRPSTASHTTGKTTQLSNQTTLPATLSTSPHNITTSQKPTQPTHTPGPTTAANNTTHTASPATIAPRPTLAPQPLSPKTGLYQVLNGSKLCIKAEMGIQLTVQDSVSVFSPQKYFNIDPNATQASGNCGSRKSNLLLNFQGGFVNLTFIKDENSYYISEVEAYLTVSNPAKVYQGMKYAMMMFETVVGHSFKCVSEQSIQLSNHLQLKTVNVQLQAFDFEDDRFGNADECISDRNRREIPVAVGLSIAVLLAVLLTACLVTRKRPSRGYERM

SEQ ID NO: 53 - protein, 408 aa, Rattus norvegicus
MPGQTSAVAVLLCLAVILHGYQIREKEFPEARGYLQYTATTTEQITAKPPLPLTNQTSHATLASRSKDDYIQTAAETSTFEDTAHITMKTAIPVTTKSLLPISSTSYTFVRTNNSHMTASSTEDTIGSGSITHLPFPTTRASLAAVNHITGRSTQLGGQTTLPKALFTPSHESTTTQRPTLSTIVSELTPTGKDRSTTSSVPLVPRPTFVTWSSPAKIGTYEVLNGSRLCIKAEMGIALIVQEKGLDSATQRHFNIDPSLTHASGKCGSQNSNLFLNFQGGSVNVTFTKEENLYYVSEVGAYLTISNTEKTYQGKSTMMMFETVVGHSFKCVSEQSIQLSAQLQMKTMNIHLQAFDFEGDSFGIVDECLSDYTVVLPVVGIIVVVLCVVGLGIYKIRQRRQSSAYQRI

SEQ ID NO: 54 - protein, 411 aa, Mus musculus
MPGQISAVAVLFLSLTVILHGYQIREKEFPKARGYLQYTATSAEQITTKPLLQLINQRSHITLASRFKDDYIQMAAETSAIENTAHITMKTVTPVTTKSLPPISSASYTFVRSNNAHMTASSTDDTIGSGSIAHLPVPTTRASLAIVNYITGRATQLGGQTTLPKTFFTASHKSTTNQRPTLSTNVLGTSTPTHKDRSTTSPVPLVPRPTLVTWSSPAKIGTYEVLNGSRLCIKAEMGLALIVQEKDLDSATQRYFNIDPSLTHASGKCDSQKSNLFLNFQGGSVNITFTKEENLYYISEVGAYLTISNTEKTYQGKKNTLMMFETVVGHSFKCVSEQSIQLSAQLQMKTMNIHLQAFDFEGDSFGNVNECLSDYTVVLPMVAIIVVVICVVGLSVYKIRQRHQSSAYQRI

SEQ ID NO: 55 - protein, 314 aa, Xenopus tropicalis
MDRVSLLSTILLLYGLLYINDAYSENTFAQPSNTTTPAPNTTTTHVTSNTTTLAPNTTTTHVTSNTTTLAPNTTTTHITSNTTTLAPNTTTTLAPNTTTTHSVTTTKTASTTTPTPTLEPKPSPPETGNYTVKIKNEFCIEALMGLELELTNSTKTQQYFNIVPSQINSNGTCEKSKANLNLTFANSYINFVFAQDDNSYYLDNVTVYFNLTRSESWYGNATNQKLLKTENGYSVKCKNTPKIQLGDTMNLVMTNVKLQVFNFKDNSFGKETTCKYDHNFGLMIAGIVIVVIVVLGVIIYFIWHKRKSSGYQRI

SEQ ID NO: 56 - protein, 478 aa, Pan troglodytes
MGRCCFYTAGTLSLLLLVTSVTLLVARVFQKAVDQSIEKKIVLRNGTEAFDSWEKPPLPVYTQFYFFNVTNPEEILRGETPRVEEVGPYTYRELRNKANIQFGDNGTTISAVSNKAYVFERDQSVGDPKIDLIRTLNIPVLTVIEWSQVRFLREIIEAMLKAYQQKLFVTHTVDELLWGYKDEILSLIHVFRPDISPYFGLFYEKNGTNDGDYVFLTGEDSYLNFTKIVEWNGKTSLDWWITDKCNMINGTDGDSFHPLITKDEVLYVFPSDFCRSVYITFSDYESVQGLPAFRYKVPAEILANTSDNAGFCIPEGNCLGSGVLNVSICKNGAPIIMSFPHFYQADERFVSAIEGMHPNKEDHETFVDINPLTGIILKAAKRFQINIYVKKLDDFVETGDIRTMVFPVMYLNESVHIDKETASRLKSMINTTLIITNIPYIIMALGVFFGLVFTWLACKGQGSMDEGTADERAPLIRT

SEQ ID NO: 57 - protein, 478 aa, Macaca mulatta
MGRCCFYTAGTLSLLLLVTSVTLLVARVFQKAVDQSIEKKIVLRNGTEAFDSWEKPPLPVYTQFYFFNVTNPEEILRGETPRVEEVGPYTYRELRNKANVQFGDNGTTISAVSNKAYVFERDQSVGDPKIDLIRTLNIPVLTVIEWSQVHFLREIIEAMLKAYQQKLFVTHTVDELLWGYKDEILSLIHVFRPDISPYFGLFYEKNGTNDGDYVFLTGEDNYLNFTKIVEWNGKTSLDWWITDKCNMINGTDGDSFHPLITKDEVLYVFPSDFCRSVYITFSDYESVQGLPAFRYKVPAEILANTSDNAGFCIPEGNCLGSGVLNVSICKNGAPIIMSFPHFYQADERFVSAIEGMHPNKEDHETFVDINPLTGIILKAAKRFQINIYVKKLDDFVETGDIRTMVFPVMYLNESVLIDKETASRLKSVINTTLIITNIPYIIMALGVFFGFVFTWLACKGQGSMDEGTADERAPLIRT

SEQ ID NO: 58 - protein, 478 aa, Canis lupus
  source 1..478: note = subspecies "familiarus"
MGRCCFYTVGTLSLLLLVTSIALLVARVFQKAVDQTIEKNIVLRNGSETFDSWKKPPLPVYAQFYFFNVTNPEEILRGEIPRLEEVGPYTYRELRDKADIQFGDNGTTISAVSNKAYVFERNQSVGDPKTDLIRTLNIPAVTAMEWAHLHFFRELIEALLKAYQQTLFVTHTVDELLWGYKDEILSLINVFKPEISPYFGLYYGKNGTNDGDYVFLTGEDNYLNFSKIVEWNGKTSLDWWTTDKCNMINGTDGDSFHPLIDKDEILYVFPSEFCRSVYITFSDFKSVQGLPAFRYKVPGEVLANTSDNAGFCVPKGNCLGSGVLNISICKNGAPIIISFPHFYEADKKFVSAIDGMRPNKDYHETFVDINPLTGIILRAAKRFQINVYVKKLDDFIETGNIRTMVFPVMYINESVLIDKDTASRLKSVINTTLIITNIPYIVMALGVFFGLIFTWLACRGQGSMDEGTPDERAPLIRT

SEQ ID NO: 59 - protein, 478 aa, Bos taurus
MGRCCFYAVGTLSLLLLVTSITLLVARVFQKAVDQTIEKNIVLRNGSETFDSWKKPPLPVYTQFYFFNVTNPEEILNGETPRLEEVGPYTYRELRNKDDIQFGDNGTTISAVSNKAYVFERDKSVGDPKIDLLRTLNIPALTAMEWTQLPLLRDIIEALLKAYRQKLFVTHTVDELLWGYKDEILSLINTFKHDVSPYFGLFYGKNGTNDGDYVFLTGEDNYLNFSKIVEWNGKTSLDWWTADECNMINGTDGDTFHPLITRDEVLYVFPSDFCRSVYITFSDFESVQGLPALRYKVPAEILANTSDNAGFCIPKGNCLGSGVLNVSVCKNGAPIIMSFPHFYQADEKFVSAIGGMHPNKEYHETFVDINPLTGIILRAAKRFQINVYVRKLDDFVETGNIQTLVFPVMYINESVLIDKETASRLKSVINTTLIVTNIPYIIMALGVFFGLIFTWLACRGQGSTDEGTADERAPLIRT

SEQ ID NO: 60 - protein, 478 aa, Mus musculus
MGRCCFYTAGTLSLLLLVTSVTLLVARVFQKAVDQTIEKNMVLQNGTKVFNSWEKPPLPVYIQFYFFNVTNPEEILQGEIPLLEEVGPYTYRELRNKANIQFGENGTTISAVTNKAYVFERNQSVGDPNVDLIRTINIPLLTVVDLAQLTLLRELIEAMLKAYQQKLFVIHTVHELLWGYKDEILSLVHIFKPDVSPNFGLFYERNGTNDGEYVFLTGEDNYLNFSKIVEWNGKTSLDWWTTDTCNMINGTDGDSFHPLISKDEVLYLFPSDLCRSVHITFSSFENVEGLPAFRYKVPAEILANTSENAGFCIPEGNCMDSGVLNISICKNGAPIIMSFPHFYQADEKFVSAIKGMHPNKEEHESFVDINPLTGIILRGAKRFQINTYVRKLDDFVETGDIRTMVFPVMYLNESVLIDKETANQLKSVINTTLVVTNIPYIIMALGVFFGLVFTWLACRGQGSMDEGTADERAPLIRT

SEQ ID NO: 61 - protein, 531 aa, Danio rerio
MTRRSCTIYATGIVCAHLLILGIALLLAQVFQTMIQERIKKEITLAENSRVLDGWINPPPPVYMQYFFFNVTNPDEFLAGKEKAKVTQMGPYTYREYRPRENVTYLENGTKIFATNPKSFVFLRNMSAGDPEVDRVTTVNIPMIAVMNELNSYSFFVRTAVSMYMGSMGMGLFMNRTVHEILWGFKDPLLTKLHAMRPEVDEHFGLMYNKNGTHEGEFVFHTGEKNYMNYGKIDTWNGISQMNWWSSNQSNMINGTDGSVFHTFLSRKELLYIFAADLCRSIHLGYVRDMEVKGIPAFRFAPPSDVLAPPDENPANAGFCVPAGDCLGKGVLKVSVCRQGAPIVVSFPHFYQADERYINAIEGMNPNEEEHETYLDINPTTGVPIRACKRAQLNIILKRVRGFPNTKFLNETIFPIMYVNETATIDDESAAQMRMLLLIVTVVSNFPVIILALGVILLVVLIFLVCRNRQRKNEVKRIDFTEAFHSFATTKDETAYTQVSNQAEDSPENRNNQPLRNGSYIAMSPVEAQKC

SEQ ID NO: 62 - protein, 478 aa, Rattus norvegicus
MARCCFYTAGTLSLLLLVTSVTLLVARVFQKAVDQTIEKNMVLQNGTKVFDSWEKPPLPVYIQFYFFNVTNPEEILQGEIPLLEEVGPYTYRELRNKANVQFGENGTTISAVTNKAYIFERNQSVGDPTVDLIRTINIPLLTVVEMAQQPFLREIIEAMLKAYQQTLFVTHTVHELLWGYKDEVLSLVHIFRPDVSPNFGLFYERNGTNDGEYVFLTGEDNYLNFTKIVEWNGKTSLDWWTTDTCNMINGTDGDSFHPLISKDETLYIFPSDFCRSVYITFSSFENVEGLPAFRYKVPAEILANSSENAGFCIPEGNCMDAGVLNVSICKNGAPIIMSFPHFYQADEKFVSAIKGMRPNKEEHESFVDINPLTGIILRGAKRFQINTYVKKLDDFVETGNIRTMVFPVMYLNESVLIDKETASQLKSVINTTLIVTNIPYIIMALGVFFGLIFTWLACRGQGSTDEGTADERAPLIRT

SEQ ID NO: 63 - protein, 481 aa, Gallus gallus
MRSLCLVTVGVLALTLLIASISLLVAHVFQTVVDLQVKQGTVLKNGTETFEAWEDPPPPVYMQFYFFNVTNPLEVLQGATPLVEEKGPYTYREYRPRVHVQFLDNGTKVSALNPKTYVFEPEKSVGNPEVDLIRTINVPAVTAMEWTRATSLQFATEVLLLLYQESLFTVRTVHELLWGYKDKLLSTIHVLHPEIDPVFGFFNKMNGTDDGEYVFLSGEMNYLNFSRIVEWKGKESLNWWTTKTCNMINGTDGTSFHPLISKDENIYIFSSDFCRSLYLVYDSSGSVAGVPTYRFVPSPMVFANTTVNPDNAGFCVPPGNCPGAGVLNVSICKQGAPIFLSAPHFYQADQKFVSDIEGMHPTKEYHETFVDINPLTGLVLQAAKRMQINIHVRKLPEFFETGNIRTLIFPVMYINESVLIDEASANKLKHVLLEASVVTGIPFVIMAIGIVFGIVFSVLVCRAQGAREESTEEERSPLIRT

SEQ ID NO: 64 - protein, 483 aa, Xenopus tropicalis
MVKWAVFGTAAVSVTLLIVSIVLLLTHTFMDIVEGQVKQAIVLKNESEVFEDWANPPPPVYMQFYFFNVTNPLEVLSGEKPFVDEIGPYTYREYRPRENITFSVNGTEVSAVTPKTYVFEPEKSIGDPKVDLIRTVNIPLVTILEMTKDSSLLRPFIIAALKTYKEGMFVTRTVDELLWGYKDAVLSILHPFKKNISDTFGLFYKMNTTDDGEYIFLSGEKDYLEFTQIAEWKGQKALNWWTTETCNMINGTDGTSFHPLLNKDDTIYMFSSDLCRSIYAVYESSENIKDISVFRFSPPASVFANVSVNPQNKGFCVPEGNCLPSGLLNVSICKEGAPIVLSSPHFYQADENVINSIRGMKPVKEHHMTFLDLNPLTGTLIQAAKRIQVNVYVRKINVYLITQDIQTLFFPVMHLNESVLIDDKSAGRLRSILFQGRVVANIPFIIMGLGIILAFLFTTLSCLQKRSRDEGTEEERGPLIRAS

SEQ ID NO: 65 - protein, 551 aa, Drosophila melanogaster
MQLDDILHINNCKADCSSLSTTPNPKTDLVNMNGPKHKFCTKLSSTYLRKWWITIVVAAALIIGGIVVACEFTVLIDAVVDRMVALRPGAKTFGWWAKPPVEPRISLYIYNVTNADDFLSNGSKAIVDEVGPYVYSETWEKVNIVENDNGTLSYNLRKIYSFREDLSVGPEDDVVIVPNIPMLSATSQSKHAARFLRLAMASIMDILKIKPFVQVSVGQLLWGYEDPLLKLAKDVVPKEQKLPYEEFGLLYGKNGTSSDRVTVNTGVDDIRRYGIIDNFNGRTHLPHWTTDACNTLAGTDGSIFPPHIDHDRILHVYDKDLCRLLPLVFEKEVMTSNEVPGYRFTPPEWVFADVDSHPDNMCFCPAGKPSCSPNGLFNVSLCQYDSPIMLSFPHFYLADESLRTQVEGISPPMKEKHQFFFDVQPKMGTTLRVRARIQINLAVSQVFDIKQVANFPDIIFPILWFEEGIDNLPDEVTDLMRFAEQVPPKIRVALIVGLCALGVILLLLSTFCLIRNSHRQSTLHLEGSNYLATAQVDMNKKQNKDNQPARY

SEQ ID NO: 66 - protein, 522 aa, Anopheles gambiae
  source 1..522: note = strain PEST
MYGRSNRLCAKLSSAFLRKWWFVIAFALSLLVLGALVTFGFTAFIRTIIDHQVALRVGGQSFGWWSRPPVEPIIRIFVYNVTNADEFLNNGTKPILDELGPYVYVQTWEKVNIKENPNGTISYNQKRVYIFNEDLSGGLEDDVVIVPNIPMLSATSQSKHAARFLRLAMASIMDILKIKPFVEVSVGQLLWGYEDPLLKLAKDVVPKEQKLPYEEFGLMYGKNSTSKDTVTVWTGVDDITQYGIIDKYNGRSHQTHWLSEQCNRLNGTDGSIFPPRITKNSTLHVYEKDLCRLLPLSFEKEVTVRGGVKGYRFTPSPDVFASVDKNPNNMCYCPAGPPCAPHGLFNVSLCQYDSPILLSFPHFYMADQTLRTAVEGISPPEKDKHQLFIDVQPDMGTALRARARIQINLAVSQVVDIKQVANFPDIVFPILWFEEGIDSLPDEILDLMKVATNIPPRAKFILTIALFGLGGFLFVVAVICLVRKSHRQSTLHLEGSNYLATASVDQAKKKAKMDNGMSSKSN

SEQ ID NO: 67 - protein, 338 aa, Homo sapiens
MVRRVQPDRKQLPLVLLRLLCLLPTGLPVRSVDFNRGTDNITVRQGDTAILRCVVEDKNSKVAWLNRSGIIFAGHDKWSLDPRVELEKRHSLEYSLRIQKVDVYDEGSYTCSVQTQHEPKTSQVYLIVQVPPKISNISSDVTVNEGSNVTLVCMANGRPEPVITWRHLTPTGREFEGEEEYLEILGITREQSGKYECKAANEVSSADVKQVKVTVNYPPTITESKSNEATTGRQASLKCEASAVPAPDFEWYRDDTRINSANGLEIKSTEGQSSLTVTNVTEEHYGNYTCVAANKLGVTNASLVLFRPGSVRGINGSISLAVPLWLLAASLLCLLSKC

SEQ ID NO: 68 - protein, 338 aa, Pan troglodytes; identical to SEQ ID NO: 67

SEQ ID NO: 69 - protein, 338 aa, Oryctolagus cuniculus
MGARVQPDRKQLPLVLLRLLCLLPTGLPVRSVDFNRGTDNITVRQGDTAILRCVVEDKNSKVAWLNRSGIIFAGHDKWSLDPRVELEKRHSLEYSLRIQKVDVYDEGSYTCSVQTQHEPKTSQVYLIVQVPPKISNISSDVTVNEGSNVTLVCMANGRPEPVITWRHLTPTGREFEGEEEYLEILGITREQSGKYECKAANEVSSADVKQVKVTVNYPPTITESKSNEATTGRQASLKCEASAVPAPDFEWYRDDTRINSANGLEIKSTEGQSSLTVTNVTEEHYGNYTCVAANKLGVTNASLVLFRPGSVRGINGSISLAVPLWLLAASLLCLLSKC

SEQ ID NO: 70 - protein, 341 aa, Mus musculus
MVGRVQPDRKQLPLVLLRLLCLLPTGLPVRSVDFNRGTDNITVRQGDTAILRCVVEDKNSKVAWLNRSGIIFAGHDKWSLDPRVELEKRHALEYSLRIQKVDVYDEGSYTCSVQTQHEPKTSQVYLIVQVPPKISNISSDVTVNEGSNVTLVCMANGRPEPVITWRHLTPLGREFEGEEEYLEILGITREQSGKYECKAANEVSSADVKQVKVTVNYPPTITESKSNEATTGRQASLKCEASAVPAPDFEWYRDDTRINSANGLEIKSTEGQSSLTVTNVTEEHYGNYTCVAANKLGVTNASLVLFSKYAKTEPDSMQVIEFLHIDLKSIRHPLKVNPIQK

SEQ ID NO: 71 - protein, 337 aa, Xenopus laevis
MVGRSQSDRNQLPLFLLRLLCLLPTGLPVRSGDFNRSTDNMTVRQGDTAILRCFVEDKSSKVAWLNRSGIIFAVDDKWSLDPRVELEKRSPFEYSLRIQKVDVSDEGPYICSVQTNQHTKTMQVYLIVQVPPKISNISADITVNEGSNVTLMCIAYGRPEPMITWRHLTPTARDFEGEEEFLEIQGITREQSGRYECKAANEVASADVKQVRVTVNYPPIITESNSNEATTGKQAILRCEASAVPAPDFEWYKDDTRINSAQGLEIRNTGSRSVLMVANVTEEHYGNYTCVAANKLGITNTSLYLYIGPGTPIDNATSLAASLWLMANILLCLFCTC

SEQ ID NO: 72 - protein, 333 aa, Danio rerio
MSCLWIHSVFIPGFFLLFGFEGFPVISVESQRSTDNITIRQGDTTVIRCYVDDKVSKVAWLNRSNIIFAGEDKWSLDPRVELVTQGQLEYSLRIQKVDVFDEGPYTCSIQTKQQSKTSQVYLIVQVPAIIYKVSEDITVNEGSNVALTCLANGRPDPAITWRLLNPSAEALDVGEYLEISGVVRSQAGRYECKASNDVSTPDVKYVNVVVNYPPYIKDVRSSETAVGQAGVLHCEASAVPQPEFEWYRDERRLSSSQSLTIQVSGSRTVLVVANVTEEDYGNYTCVATNRLGVHNASVFLYKPGMGRDINSAGCICQSLWLLLLCVSSALLQC

SEQ ID NO: 73 - protein, 197 aa, Mus musculus
MSGSSRRLLWAATCLAVLCVSAAQPNITTLAPNVTEVPTTTTKVVPTTQMPTVLPETCASFNSCVSCVNATFTNNITCFWLHCQEANKTYCANEPLSNCSQVNRTDLCSVIPPTTPVPTNSTAKPTTRPSSPTPTPSVVTSAGTTNTTLTPTSQPERKSTFDAASFIGGIVLVLGVQAVIFFLYKFCKSKERNYHTL

SEQ ID NO: 74 - protein, 197 aa, Macaca mulatta
MSRLSRSLLWAVTCLAVLCVLSAEENPTPHTNVTSLAPTSNITSAPVTSLPLVTTPAPETCEGRNSCVSCFNASTVNTTCFWIECKDESYCSHNSTVSDCQVGNTTDFCSVPTATLVPTANSTAKPTVQPSPSTTSKTVTTSGTTNTTVTPTSQPVRKSTFDAASFIGGIVLVLGVQAVIFFLYKFCKSKERNYHTL

SEQ ID NO: 75 - protein, 194 aa, Sus scrofa
MLGLSRQLLWAVGCLAALCVLTAAKNSTILPPSTTTPWLSPPTTQTTSAPPKTLPTPAPEICENRNSCISCFDANNTCFWIECKGKSYCSDNSTVSDCHVVNGTDFCSGPTVTPLPTNSTAKTTTLPSPSSASTTATTSGTTNTTLAPTTQPMRKSTFDAASFIGGIVLVLGVQAVIFFLYKFCKSKERNYHTL

SEQ ID NO: 76 - protein, 198 aa, Bos taurus
MSGLSRPLLLAVGCLAALCVITAAGNTTLAPNVTTASSPPPTTTTVPVSPTTLSPLPVTTPAPDICGSRNSCVSCVDGNATCFWIECKGKSYCSDNSTAGDCKVVNTTGFCSVPTTTPTPTNSTAKTTTLPSTTTTSTTATTSGTTNTTLSPTIQPTRKSTFDAASFIGGIVLVLGVQAVIFFLYKFCKSKERNYHTL

SEQ ID NO: 77 - protein, 198 aa, Ovis aries
MSGLSRPLLLAVGYLAALCVITAARNTTVTPNVTTPSSPPPTTATVPVSPTTLTPPPVTTPAPDICGSRNSCISCVDGNATCFWIECKGKSYCSDNSTVSDCKVVNTTGFCAVPTTTPTPTNSTAKTTTLPSTTTTSTTATTSGTANTTLTPTIQPMRKSTFDAASFIGGIVLVLGVQAVIFFLYKFCKSKERNYHTL

SEQ ID NO: 78 - protein, 198 aa, Canis lupus
  source 1..198: note = subspecies "familiarus"
MSGLSRQLCWAAACLAALCALTAAQSFSSDPNGTTTTTQATTDAATTRVTTAAPATTPAPDPCDNRNSCVSCVNTSVDATACSWIECKEKSYCSHNTTVSDCQVVNSTQLCSAPEPTMMPTNSTAKTTTQPSSSTATTTATTSGTTNITLSPTSQPGRKSTFDAASFIGGIVLILGVQAVIFFLYKFCKSKERNYHTL

SEQ ID NO: 79 - protein, 195 aa, Rattus norvegicus
MSGASRGLFWAATCLAALCLSAAQSNSSASPNVTDPPTTTSKVVPTTLTTTKPPETCESFNSCVSCVNATLTNNITCVWLDCHEANKTYCSSELVSNCTQKTSTDSCSVIPTTPVPTNSTAKPTTRPSSPTPTPSVVTSAGATNTTVTPTSQPERKSTFDAASFIGGIVLVLGVQAVIFFLYKFCKSKERNYHTL

SEQ ID NO: 80 - protein, 354 aa, Homo sapiens
MRLAVLFSGALLGLLAAQGTGNDCPHKKSATLLPSFTVTPTVTESTGTTSHRTTKSHKTTTHRTTTTGTTSHGPTTATHNPTTTSHGNVTVHPTSNSTATSQGPSTATHSPATTSHGNATVHPTSNSTATSPGFTSSAHPEPPPPSPSPSPTSKETIGDYTWTNGSQPCVHLQAQIQIRVMYTTQGGGEAWGISVLNPNKTKVQGSCEGAHPHLLLSFPYGHLSFGFMQDLQQKVVYLSYMAVEYNVSFPHAAQWTFSAQNASLRDLQAPLGQSFSCSNSSIILSPAVHLDLLSLRLQAAQLPHTGVFGQSFSCPSDRSILLPLIIGLILLGLLALVLIAFCIIRRRPSAYQAL

SEQ ID NO: 81 - protein, 354 aa, Pan troglodytes
MRLAVLFSGALLGLLAAQGTGNDCPHKKSATLLPSFTVTPTVTESTGTTSHRTTKSHKTTTHRTTTTGTASHGPTTATHNPTTTSHGNVTVHPTSNSTATSQGPSTATHSPATTSHGNATVHPTSNSTATSPGFTSSAHPEPPPPSPSPSPTSKETIGDYTWTNGSQPCVHLQAQIQIRVMYTTQGGGEAWGISVLNPNKTKVQGSCEGAHPHLLLSFPYGHLSFGFMQDLQQKAVYLSYMAVEYNVSFPHAAQWTFSAQNASLRDLQAPLGRSFSCSNSSIILSPAVHLDLLSLRLQAAQLPHTGVFGQSFSCPSDRSILLPLIIGLILLGLLALVLIAFCIIRRRPSAYQAL

SEQ ID NO: 82 - protein, 335 aa, Bos taurus
MRLAVFFSGALLGLLAAQGTGNDCPHKKSATLLPSFTVTPTATESTPSPGTTSHRTTKSHRTTTWRISTTTHTTNTTGTTSSESPTATHSPATTTSHQNTTVHPTSNITATSPGPSTRSPHPEPPPSPSPSPGSKEAIGDYTWSNGSQPCVRLQAQIQIRVLYPTQGGGEAWGISVLNPNRTKAQGGCEGTHSHLLLSFPSGQLSFGFKQDPLQSAVYLNYMAVEYNVSFPQAVQWTFSVQNSSLRDLQTPLGHSFSCRNASIIVSPALHLDLLSLKLQAAQLSPSGAFGPSFSCPNDKSILLPLIIGLILLGLLTLVLVTFCIIRRRPPTYQPL

SEQ ID NO: 83 - protein, 335 aa, Mus musculus
MRLPVCLILLGPLIAQGTEEDCPHKKAVTLLPSFTMTPTATESTASPTTSHRPTTTSHGNVTVHTSSGPTTVTHNPATTTSHGNATISHATVSPTTNGTATSPRSSTVGPHPGPPPPSPSPRSKGALGNYTWANGSQPCVQLQAQIQIRILYPIQGGRKVKLKWGLKRAWGISVLNPNKTKVQGGCDGTHPHLSLSFPYGQLTFGFKQDLHQSPSTVYLDYMAVEYNVSFPQAAQWTFMAQNSSLRELQAPLGQSFCCGNASIVLSPAVHLDLLSLRLQAAQLPDKGHFGPCFSCNRDQSLLLPLIIGLVLLGLLTLVLIAFCITRRRQSTYQPL

SEQ ID NO: 84 - protein, 354 aa, Macaca mulatta
MRLAVLFLGALLGLLAAQGTGNDCPHKKSATLLPSFTVTPTATESTGTTSHRTTKSHKTTTHRTTTTGTTSHRPTTATHNPTTTSHRNATVHPTSNSTATSQGPSTATHRPATTSHGNATVHPTSNSTATSPGLTSSAHPGPPPPSPSPSPASKETIGDYMWTNGSQPCVHLQAQIQIRVMYTTQGGGEAWGISVLNPNKTKVQGSCEGAHPHLLLSFPYGHLSFGFMQDLQQRVVYLSYMAVEYNVSFPHAAQWTFSAQNASLRDLQAPLGQSFSCSNSSIILSPAVHLDLLSLRLQAAQLPHTGVFGQSFSCPSDRSILLPLIIGLVLLGLLALVLIAFCIVRRRPSAYQAL

SEQ ID NO: 85 - protein, 330 aa, Rattus norvegicus
MRFPVCLTLLVLLVAQGTGKDCPHKKAATLLPSFTETPTTTGSTASPTTTHRPTTTSHRPTTTSHRPTTTSHRPTTTSHRPTTTSHRPTTTSHGNATVSPTTNSPGFSTVGPHPGPPPPSPSPSPSSTGALGNYTWTNGSQPCVQLQAQIQIRILYLTQGGKKAWGLSVLNPNKTKVQGGCDSAHPHLALSFPYGQLTFGFKQDRHQSHSTVYLNYMAVEYNVSFPQAAQWTFSAQNSSLQELQAPLGQSFCCGNTSIVLSPAIHLDLLSLRLQAAQLPDKGHFGPCFSCASDQSLLLPLIIGLVLLGLLTLVLIAFCVTRRRQSTYQPL

SEQ ID NO: 86 - protein, 329 aa, Canis lupus
  source 1..329: note = subspecies "familiarus"
MRPAVFFLGALVGLLAAQGTRSDCPHKKSATLLPSFTVTPTATESTGSPGTTSHSTTTAETTSHAPNTTTHQAPTTPGHRNTTIHPTTSNSTSNTTGTTGTGKPHTSTSYTQPGPGPRPPPPSPGPGPQDAIGDYTWTTGSQPCARLQARIQIGVVYPTQAGGQAWGISVLNPNSTKPWGDCDGARPHLLLSFPFGQLSFGFTQEPQQGSVYLDYLALQYNVSFPQAAQWTFSGQNASLRALQAPLGQSFSCRNASILLTPALRLDLLHLKLQAAQLPPSGAFGPSFSCPSEHFNLLPLIVGVISLGLLALALVTFCIIRRRPPTYQPL

SEQ ID NO: 87 - protein, 322 aa, Equus caballus
MRLAVLFSGALLGLLAAQETGNDCPHKKSATLLPSFTVTPTATESTASPGTTSHQTTQSHRTTTTGTTSDHPTTATHNPTTTSHGNTTVHPTTSNSTVTSPGSASSSPHPRPPPPSPSPSPGSKEAIGDYIWTNGSQPCVRLQAQIQIRVLYPTLGGGKAWGISVLNPNKTKAQGGCAHPHLLLSFPYGQLSFGFKQEPLQSTVYLNYIAVEYNVSFPQAAQWTFLVQNSSLRDLQAPLGQRFSCRNASIALSPAFHLDLLSLKLQAAQLTPTGAFGPSFSCPSDQSILLPLIIGLILLGLFALVLITFCVIRRRPPTYQAL

SEQ ID NO: 88 - protein, 305 aa, Oryctolagus cuniculus
MRLPVLFLALLGLHAASSGTTSHRTTKNPHTTSHSTATPGTTSHRPTTATPTTGHGNVTVHPTTSNTTSNTTTTTGTSPGFSTSTPHPGPPPPPPSPSPGSREAVGNYTWTNGSQPCVQLQAQIQIRVLYPTQGGGQAWGMSVLNPNRTKAQGGCEGPRPHLLLSFPYGQLSFGFKQDPGQGQSAVYLSYLAVEYNVSFPQAARWTFSAQNASLRDLQAPLGQSFSCRNASIAVSPALHLDLLSLRVQAAQLPRTGIFGPSFSCPADHPSILVPLIIGLILVGLLALVLVAFCIARRRPSAYQAL

SEQ ID NO: 89 - protein, 291 aa, Sus scrofa
MTLAVLFLGALLGLLAESTTSHRTTTPRTTTTGTTSHGPTTVTHNPATTTSHGNATVHPTSSSTATSPGSSTRPPHPGPPPPSPSPSPGSQEAIGDYTWTNGSQPCVQLQAQIQIRVLYPTQGGGEAWGISVLNPNKTKALGGCEGAHPHVRLSFPYGQLTFGFKQQPQESTVYLNYMAVEYNVSFPRAAQWTFSVQNSSLRDLQTPVGRSYSCRNASIILSTAFHLDLLSLKLQAAQLPPTGNFGPSFSCPSDQTILLPLIIGLIFLGLLILVLVTFCIIRRRPPAYQPL

SEQ ID NO: 90 - protein, 354 aa, Papio anubis
MRLAVLFSGALLGLLAAQGTGNDCPHKKSATLLPSFTVTPTATESTGTTSHRTTKSHKTTTHRTTTTGTTSHRPTTATHNPNTTSHRNATVHPTSNSTATSQGPSTATHRPATTSHGNATVHPTSNSTATSPGLTSSAHPGPPPPSPSPSPASKETIGDYMWTNGSQPCVHLQAQIQIRVMYTTQGGGEAWGISVLNPNKTKVQGSCEGAHPHLLLSFPYGHLSFGFMQDLQQRVVYLSYMAVEYNVSFPHAAQWTFSAQNASLRDLQAPLGQSFSCSNSSIILSPAVHLDLLSLRLQAAQLPHTGVFGQSFSCPSDRSILLPLIIGLVLLGLLALVLIAFCIVRRRPSAYQAL

SEQ ID NO: 91 - protein, 323 aa, Monodelphis domestica
MRLSLLLSGILLGLLAEQGAGDKCPQEKSVTLVPSFTVTTIATERSTTSPETTTSSGSTATTYRTSTAATTPHSNSTATSYSTTSEGTAVTHGTTTSPRNTSTTSTSQSVPVPPSPQPTSSPSGAVGDYIGANGSQLCVHLRAQIQMRVLYQASGGGKLWGIFVLNPNRTMAQGNCEANHSSLILSFPNGKLIFGFKQDSIKKIVYLSHLATEFNVSFPSATRWIFSVENSSLQDLQTPLGHSFSCRNRSIALSPDIHLDLLSLQLQAAQLSSSGAFGAAFSCSADLNILVPLVVGLVLLTLLILVLSAFCISRRRPPAYQPL

SEQ ID NO: 92 - protein, 263 aa, Ornithorhynchus anatinus
MGLTLPLPAQGSQCRANCPHKKSATLVPSFTVTPTATSGPTTTAHQTTTDHGTTTSHETTTSQGTSTHGTSTPHTTTTGHGTTTGHQNTSHSTTTSHGTSTPHKTTTRHPTTSHGTTTSHGTSTGHWTARPTIRPGPPPPPPSPGKAVGNYTVFNGSQPCLRLRAEIRLWVLYQAQEEGEAPPVSGAASFPPPRPRPVAGEGDGERSRVTPVASAMTVEGGSRAGFAMLGAEVRSRAPSLGRAGKTRLRIHQPVVVLQHTYYV

SEQ ID NO: 93 - protein, 280 aa, Homo sapiens
MDLQGRGVPSIDRLRVLLMLFHTMAQIMAEQEVENLSGLSTNPEKDIFVVRENGTTCLMAEFAAKFIVPYDVWASNYVDLITEQADIALTRGAEVKGRCGHSQSELQVFWVDRAYALKMLFVKESHNMSKGPEATWRLSKVQFVYDSSEKTHFKDAVSAGKHTANSHHLSALVTPAGKSYECQAQQTISLASSDPQKTVTMILSAVHIQPFDIISDFVFSEEHKCPVDEREQLEETLPLILGLILGLVIMVTLAIYHVHHKMTANQVQIPRDRSQYKHMG

SEQ ID NO: 94 - protein, 280 aa, Pan troglodytes
MDLRGRAVPSIDRLRVLLMLFHTMAQIMAEQEVENLSGLSTNPEKDIFVVRENGTTCLMAEFAAKFIVPYDVWASNYVDLITEQADIALTRGAEVKGRCGHSESELQVFWVDRAYALKMLFVKESHNMSKGPEATWRLSKVQFVYDSSEKTHFKDAVSAGKHTANSHHLSALVTPAGKSYECQAQQTISLASSDLQKTVTMILSAVHIQPFDIISDFVFSEEHKCPVDEREQLEETLPLILGLILGLVIMVTLAIYHVHHKMTANQVQIPRDRSQYKHMG

SEQ ID NO: 95 - protein, 280 aa, Macaca mulatta
MDLQGRAVPSVDRLRVLLMLFHTMAQIMAEQEVENLSGLSTNPEKDIFVVRENGTTCLMAEFAAKFIVPYDVWASNYVDLITEQADIALTRGAEVKGRCGHSESELQVFWVDRAYALKMLFVKESHNTSKGPEATWRLSKVQFVYDSSEKTHFKDAVSAGKHTANSHHLSALVTPAGKSYECQAQQTISLASSDPQKMVTMILSAVHIQPFDIISDFVFSEEHKCPVDEREQLEETLPLILGLILGLVIVVTLTIYHVHHKMTANQVQIPRDRSQYKHMG

SEQ ID NO: 96 - protein, 280 aa, Canis lupus
  source 1..280: note = subspecies "familiarus"
MDLRGRAFPSVYRLRVLLMLFYTMARITAEQEVENLSGLSTNPEKDIFVVRENGTTCLMAEFAAKFIVPYDVWASNYVDLITEQADISLTRGAEVKGHCGHNESELQVFWVDRAYALKMLFVKESRNASKGPEATWRLSKVQFVYDSSEKTHFKDAVSAGKHTANSHRLSALVTPAGKSYECQAQQSISLASSDPQKTVTMILSAVHIQPFDIISDFVFSEEHKCPVDEREQLEETLPLILGLILGLVIVVTLAIYHIHHKMTANQVQIPRDRSQYKHMG

SEQ ID NO: 97 - protein, 280 aa, Bos taurus
MDLRRRALLGVDGLRVLLMLFHTVTRIMAEQEVENLSGLSTNPEKDIFVVRENGTTCLMAEFAAKFIVPYDVWASNYVDLITEQADISLTRGAEVKGHCGHDESELQVFWVDRAYALKMLFLKESHNTPKGPEATWKLSKVQFVYDSSEKTHFKDAVSAGKHTANSHHLSALVTPAGKSYECQAQQTISLASSDPQKTVTMILSAVHIQPFDIISDFVFSEEHKCPVDEREQLEETLPLILGLILGLVIVVTLVIYHIHHKMTANQVQIPRDRSQYKHMG

SEQ ID NO: 98 - protein, 280 aa, Mus musculus
MDLRVRTLLGGDRLRILLMFFHVMVQTVAEQEVENLSGLSTNPEKDIFVVRENGTTCLMAEFAAKFIVPYDVWASNYVDLITEQAEISLTRGAEVKGHCGHNESELEVFWVDHAYTLRMLFVKESHNTSKGPEATWNLNKVHFVYDSSEKTHFKAPVKVNKYIASSHHLSALVTPAGMSYECQAQQTISLASSDPQKTVTMILSAVHIQPFDIISDFVFSEEHKCPVDEQEQLEETLPLILGLILGLVIVITLVIYHIHHKMTANQVQIPRDRSQYKHMG

SEQ ID NO: 99 - protein, 280 aa, Rattus norvegicus
MDLRGRALLGGDRLRILLMFFHAMAQTVAEQEVENLSGLSTNPEKDIFVVRENGTTCLMAEFAAKFIVPYDVWASNYVDLITEQAEISLTRGAEVKGRCGHNESELQVFWVDRAYTLKMLFVKESHNTSKGLEATWKLSKVQFVYDSSEKTHFKDAVSAGKHTANSHHLSALVTPAGMSYECQAQQTISLASSDPQKTVTMILSAVHIQPFDIISDFVFSEEHKCPVDEREQLEETLPLILGLILGLVIVITLVIYHIHHKMTANQVQIPRDRSQYKHMG

SEQ ID NO: 100 - protein, 299 aa, Gallus gallus
MAAGRLPGLLFLLHAAARLAAEQEVENLSGLSPNPEKDIFVVRENRTTCLMAEFAAKFVVPYDVWASNYVDLITEQADIPLSRGAEMKGKCGTNESELEISWLERAYTLKLFFLKVRGCPRRLGRGRCAAALRGPDQPCPPQEGHNTSRGPEAFWRLSRIQFSYDTSERTYFKDAVSPGKHTASSHRLSALVTPAGKSYECQAQQTISLISSDHQKSVQLLLSEVRIQPFDITADFVFSEEHKCPVDQREQLEETLPLILGLILGLVIVITLCVYHIHHKLTANQVQIPRDRSQYKHMG

SEQ ID NO: 101 - protein, 276 aa, Xenopus tropicalis
MDYRACTSALRMPVLLLLLCTFSCNLAEQEVENLSGLSSNPDKNIFAIRENGTTCLMAEFSARILVPYEVPSSNEVDWDLEEASIQLPRDTEIRGKCWNNESELHLSWLDKAYTLKLFFSKEGQDASKSRSWKMSKIQFLYDPSEHTIFKSGARPGRHTANSHHLSLMVTPAGMSYECEATQRISLTSTDHQKIVVLYLSEVHLQPFDIKSDFVYSEEYKCPTDQRKQLEETLPLILGLTLGVAILIIVAVYHIHHKMTANQVQIPRDRSLYKHMG

SEQ ID NO: 102 - protein, 338 aa, Rattus norvegicus
MVGRVQPDRKQLPLVLLRLLCLLPTGLPVRSVDFNRGTDNITVRQGDTAILRCVVEDKNSKVAWLNRSGIIFAGHDKWSLDPRVELEKRHALEYSLRIQKVDVYDEGSYTCSVQTQHEPKTSQVYLIVQVPPKISNISSDVTVNEGSNVTLVCMANGRPEPVITWRHLTPLGREFEGEEEYLEILGITREQSGKYECKAANEVSSADVKQVKVTVNYPPTITESKSNEATTGRQASLKCEASAVPAPDFEWYRDDTRINSANGLEIKSTEGQSSLTVTNVTEEHYGNYTCVAANKLGVTNASLVLFRPGSVRGINGSISLAVPLWLLAASLFCLLSKC

SEQ ID NO: 103 - protein, 338 aa, Equus caballus
MVGRVQPDRKQLPLVLLRLLCLLPTGLPVRSVDFNRGTDNITVRQGDTAILRCVVEDKNSKVAWLNRSGIIFAGHDKWSLDPRVELEKRHSLEYSLRIQKVDVYDEGSYTCSVQTQHEPKTSQVYLIVQVPPKISNISSDVTVNEGSNVTLVCMANGRPEPVITWRHLTPTGREFEGEEEYLEILGITREQSGKYECKAANEVSSADVKQVKVTVNYPPTITESKSNEATTGRQASLKCEASAVPAPDFEWYRDDTRITSANGLEIKSTEGQSSLTVANVTEEHYGNYTCVAANNLGVTNASLVLFRPGSVRGINGSISLAVPLWLLAASLLCLLSKC

SEQ ID NO: 104 - protein, 338 aa, Sus scrofa
MVARVQPDRKQLPLVLLRLLCLLPTGLPVRSVDFNRGTDNITVRQGDTAILRCVVEDKNSKVAWLNRSGIIFAGHDKWSLDPRVELEKRHSLEYSLRIQKVDVYDEGSYTCSVQTQHEPKTSQVYLIVQVPPKISNISSDVTVNEGSNVTLVCMANGRPEPVITWRHLTPTGRELEGEEEYLEILGITREQSGKYECKAANEVSSADVKQVKVTVNYPPTITESKSNEATTGRKASLKCEASAVPAPDFEWYRDDTRINSANGLEIKSTEGQSSLTVTNVTEEHYGNYTCVAANNLGVTNASLVLFRPGSVRGINGSISLAVPLWLLAASLLCLLSKC

SEQ ID NO: 105 - protein, 338 aa, Bos taurus
MVARVQPDRKQLPLVLLRLLCLLPTGLPVRSVDFNRGTDNITVRQGDTAILRCVVEDKNSKVAWLNRSGIIFAGHDKWSLDPRVELEKRHSLEYSLRIQKVDVYDEGSYTCSVQTQHEPKTSQVYLIVQVPPKISNISSDVTVNEGSNVTLVCMANGRPEPVITWRHLTPTGREFEGEEEYLEILGITREQSGKYECKAANEVSSADVKQVKVTVNYPPTITESKSNEATTGRKASLKCEASAVPAPDFEWYRDDTRINSANGLEIKSTEGQSSLTVTNVTEEHYGNYTCVAANNLGMTNASLVLFRPGSVRGINGSISLAVPLWLLAASLLCLLSKC

SEQ ID NO: 106 - protein, 417 aa, Anopheles gambiae
  source 1..417: note = strain PEST
MSFAGEAASQILNKAEPLFISRSEAFKFAVGDTITLPCEVASPGTYVLAWKRGIAILTAGSVKVTPDPRVRLVNGYSLQIRDAVPQDAGDYICQIAMLDPREITHSVEILVPPKITHVTSGGHLQVRKGSPVRLECSATGNPMPNITWTRKNNLLPNGEEQFTNPVYVIENMDRHKGGTYICTANNGVGQVATSQIILHVLYPPEISVENPTVYSGEGQEAMLVCIVHGESQPEVLWHKDTMQIDQTERHVIENRGARHTLIIRKVHPQDFGNYSCIADNQLGKTRKTVTLTGKPKTAVFRSVPNSQWKDKYNISWIVDSHSPIEEFKLYYRQMTFSIGQLQPLQTDWRDIVLPAFPYSHHYTQGMSYLIRGLEPDQQYEARVQSRNRYGWSDFSESFLFTTSNTGKWMGQCCTNPG

SEQ ID NO: 107 - protein, 334 aa, Xenopus tropicalis
MRPCLLHSIWMLGFVLCLLSLQGLPVRSGDFNRSTDNITVRQGDTAILRCFVEDRSSRVAWLNRSGIIFAGDDKWSLDPRVELEKRSLLEYSLRIQKVDVSDEGPYTCSVQTKQHTKTTQVYLIVQVPPKISNISADITVNEGSNVTLMCIAYGRPEPMITWRHLTPTARDFEGEEEFLEIQGITREQSGRYECKAANEVASADVKQVRVTVNYPPIITESKSNEATTGKQAILRCEASAVPAPDFEWYKDDTRINSAQGLEIRNTGSRSVLMVANVTEEHYGNYTCVAANKLGITNTSLYLYIGPGTPIDSATSLAASLWLMANLLFCLFCTC

SEQ ID NO: 108 - protein, 338 aa, Canis lupus
  source 1..338: note = subspecies "familiarus"
MLGARRPPRSQLPLVLLRLLCLLPTGLPVRSVDFNRGTDNITVRQGDTAILRCVVEDKNSKVAWLNRSGIIFAGHDKWSLDPRVELEKRHSLEYSLRIQKVDVYDEGSYTCSVQTQHEPKTSQVYLIVQVPPKISNISSDVTVNEGSNVTLVCMANGRPEPVITWRHLTPTGREFEGEEEYLEILGITREQSGKYECKAANEVSSADVRQVKVTVNYPPTITESKSNEATTGRKASLKCEASAVPAPDFEWYRDDTRINSANGLEIKSTEGQSSLTVTNVTEEHYGNYTCVAANNLGVTNASLVLFRPGSVRGINGSISLAVPLWLLAASLLCLLSKC

SEQ ID NO: 109 - protein, 338 aa, Monodelphis domestica
MVGRVHPDRKQLPLVLLRLLCLLPTGLPVRGVDFTRGTDNITVRQGDTAILRCYVEDKSSKVAWLNRSGIIFAGHDKWSLDPRVELEKRTALEYSLRIQKVDVYDEGSYTCSVQTQHQPKTSQVYLIVQVPPKISNISSDVTVNEGSNVTLVCMANGRPEPVITWRHLTPTGREFEGEEEYLEILGITREQSGKYECKAANEVSSADVKQVKVTVNYPPTITESKSNEATTGRQASLKCEASAVPAPDFEWYRDDTRINSANGLEIKSIEGQSLLMVTNVTEEHYGNYTCVAANKLGVTNASLILFRPGSVRGINGSISLAVPLWLLAASLFCLLSKC

SEQ ID NO: 110 - protein, 338 aa, Gallus gallus
MVARAQPDRKQLPLVLLRLLCLLPTGLPVRSVDFTRGTDNITVRQGDTAILRCFVEDRSSKVAWLNRSGIIFAGEDKWSLDPRVELEKRSPLEYSLRIQKVDVYDEGSYTCSVQTQHHPKTSQVYLIVQVPPKISNISSDITVNEGSNVTLVCMANGRPEPVITWRHLTPTGKEFEGEEEYLEILGITREQSGKYECKAANEVASADVKQVRVTVNYPPTITESKSNEAATGRQALLRCEASAVPTPDFEWYRDDTRINSANGLEIKSTGSQSLLMVANVTEEHYGNYTCVAANKLGVTNASLYLYRPGTGRVDNGSVSLAVPLWLLAASLLCLLSKC

SEQ ID NO: 111 - protein, 335 aa, Taeniopygia guttata
MRTYWLHSIWVLGFFLSLFSLQGLPVRSVDFTRGTDNITVRQGDTAILRCYVEDRSSKVAWLNRSGIIFAGEDKWSLDPRVELEKRNPLEYSLRIQKVDVYDEGSYTCSVQTQHHPKTSQVYLIVQVPPKISNISSDITVNEGSNVTLVCMANGRPEPVITWRHLTPTGKEFEGEEEYLEILGITREQSGKYECKAANEVASADVKQVRVTVNYPPTITESKSNEAATGRQALLRCEASAVPTPDFEWYRDDTRINSANGLEIKSTGSQSLLMVANVTEEHYGNYTCVAANKLGVTNASLYLYRPGTGRVDNGSMSLAVPLWLLAASLLCLLSKC

SEQ ID NO: 112 - protein, 334 aa, Xenopus tropicalis; identical to SEQ ID NO: 107

SEQ ID NO: 113 - protein, 337 aa, Oreochromis niloticus
MQVGRKSCWRQLQASFFRLLCLIPTGFPVRSVDMQRATDNITIRQGDTAIIRCYVDDKVSKVAWLNRSNIIFAGQDKWSLDPRVDLVTKGQLEYSLRIQKVDVYDEGSYTCSIQTKQQPKTSQVYLIVQVPASIYQVSNDITVNEGSNVTLSCLANGRPDPAITWRLLNPSAEPLDGEEYLDIIGIMRTQAGRYECKASNDVATPDVKYVNVIVNYPPTIKKTQSSETPVGRNGTLRCEVTAVPTPEFEWYRDDKRLANTQSITIQTSGTTTSLTIANITEEDYGNYTCVASNRLGVQNASLFLYRPGTGRDINGSACVSQSLWLLLASFACLFLKC

SEQ ID NO: 114 - protein, 27 aa, synthetic construct
  REGION 1..27: note = LAMP Signal Sequence; Protein Sequence
MAPRSARRPLLLLLLLLLLGLMHCASA

SEQ ID NO: 115 - protein, 166 aa, synthetic construct
  REGION 1..166: note = N-LAMP Protein Sequence
AMFMVKNGNGTACIMANFSAAFSVNYDTKSGPKNMTLDLPSDATVVLNRSSCGKENTSDPSLVIAFGRGHTLTLNFTRNATRYSVQLMSFVYNLSDTHLFPNASSKEIKTVESITDIRADIDKKYRCVSGTQVHMNNVTVTLHDATIQAYLSNSSFSRGETRCEQD

SEQ ID NO: 116 - protein, 36 aa, synthetic construct
  REGION 1..36: note = C-LAMP Protein Sequence
ADPHRCGWCPGGAGPHRPHRLPRRQEEESRRLPDYL

SEQ ID NO: 117 - protein, 35 aa, synthetic construct
  REGION 1..35: note = TM Cyto LAMP Protein Sequence
LIPIAVGGALAGLVLIVLIAYLVGRKRSHAGYQTI

SEQ ID NO: 118 - protein, 670 aa, synthetic construct
  REGION 1..670: note = SARS CoV-2 S1 Spike Protein Sequence
VNLTTRTQLPPAYTNSFTRGVYYPDKVFRSSVLHSTQDLFLPFFSNVTWFHAIHVSGTNGTKRFDNPVLPFNDGVYFASTEKSNIIRGWIFGTTLDSKTQSLLIVNNATNVVIKVCEFQFCNDPFLGVYYHKNNKSWMESEFRVYSSANNCTFEYVSQPFLMDLEGKQGNFKNLREFVFKNIDGYFKIYSKHTPINLVRDLPQGFSALEPLVDLPIGINITRFQTLLALHRSYLTPGDSSSGWTAGAAAYYVGYLQPRTFLLKYNENGTITDAVDCALDPLSETKCTLKSFTVEKGIYQTSNFRVQPTESIVRFPNITNLCPFGEVFNATRFASVYAWNRKRISNCVADYSVLYNSASFSTFKCYGVSPTKLNDLCFTNVYADSFVIRGDEVRQIAPGQTGKIADYNYKLPDDFTGCVIAWNSNNLDSKVGGNYNYLYRLFRKSNLKPFERDISTEIYQAGSTPCNGVEGFNCYFPLQSYGFQPTNGVGYQPYRVVVLSFELLHAPATVCGPKKSTNLVKNKCVNFNFNGLTGTGVLTESNKKFLPFQQFGRDIADTTDAVRDPQTLEILDITPCSFGGVSVITPGTNTSNQVAVLYQDVNCTEVPVAIHADQLTPTWRVYSTGSNVFQTRAGCLIGAEHVNNSYECDIPIGAGICASYQTQTNSPRRAR

SEQ ID NO: 119 - protein, 1258 aa, synthetic construct
  REGION 1..1258: note = Exemplary SARS CoV-2 Spike Protein Sequence (16-1273)
VNLTTRTQLPPAYTNSFTRGVYYPDKVFRSSVLHSTQDLFLPFFSNVTWFHAIHVSGTNGTKRFDNPVLPFNDGVYFASTEKSNIIRGWIFGTTLDSKTQSLLIVNNATNVVIKVCEFQFCNDPFLGVYYHKNNKSWMESEFRVYSSANNCTFEYVSQPFLMDLEGKQGNFKNLREFVFKNIDGYFKIYSKHTPINLVRDLPQGFSALEPLVDLPIGINITRFQTLLALHRSYLTPGDSSSGWTAGAAAYYVGYLQPRTFLLKYNENGTITDAVDCALDPLSETKCTLKSFTVEKGIYQTSNFRVQPTESIVRFPNITNLCPFGEVFNATRFASVYAWNRKRISNCVADYSVLYNSASFSTFKCYGVSPTKLNDLCFTNVYADSFVIRGDEVRQIAPGQTGKIADYNYKLPDDFTGCVIAWNSNNLDSKVGGNYNYLYRLFRKSNLKPFERDISTEIYQAGSTPCNGVEGFNCYFPLQSYGFQPTNGVGYQPYRVVVLSFELLHAPATVCGPKKSTNLVKNKCVNFNFNGLTGTGVLTESNKKFLPFQQFGRDIADTTDAVRDPQTLEILDITPCSFGGVSVITPGTNTSNQVAVLYQDVNCTEVPVAIHADQLTPTWRVYSTGSNVFQTRAGCLIGAEHVNNSYECDIPIGAGICASYQTQTNSPRRARSVASQSIIAYTMSLGAENSVAYSNNSIAIPTNFTISVTTEILPVSMTKTSVDCTMYICGDSTECSNLLLQYGSFCTQLNRALTGIAVEQDKNTQEVFAQVKQIYKTPPIKDFGGFNFSQILPDPSKPSKRSFIEDLLFNKVTLADAGFIKQYGDCLGDIAARDLICAQKFNGLTVLPPLLTDEMIAQYTSALLAGTITSGWTFGAGAALQIPFAMQMAYRFNGIGVTQNVLYENQKLIANQFNSAIGKIQDSLSSTASALGKLQDVVNQNAQALNTLVKQLSSNFGAISSVLNDILSRLDPPEAEVQIDRLITGRLQSLQTYVTQQLIRAAEIRASANLAATKMSECVLGQSKRVDFCGKGYHLMSFPQSAPHGVVFLHVTYVPAQEKNFTTAPAICHDGKAHFPREGVFVSNGTHWFVTQRNFYEPQIITTDNTFVSGNCDVVIGIVNNTVYDPLQPELDSFKEELDKYFKNHTSPDVDLGDISGINASVVNIQKEIDRLNEVAKNLNESLIDLQELGKYEQYIKWPWYIWLGFIAGLIAIVMVTIMLCCMTSCCSCLKGCCSCGSCCKFDEDDSEPVLKGVKLHYT

SEQ ID NO: 120 - protein, 21 aa, Mus musculus
METDTLLLWVLLLWVPGSTGD

SEQ ID NO: 121 - DNA, 63 bp, Mus musculus
  source 1..63: mol_type = genomic DNA
atggaaaccgatacactgctgctgtgggtgctgttgctctgggttccaggatctacaggcgac

SEQ ID NO: 122 - protein, 22 aa, Homo sapiens
MDMRVPAQLLGLLLLWLRGARC

SEQ ID NO: 123 - DNA, 66 bp, Homo sapiens
  source 1..66: mol_type = genomic DNA
atggacatgcgtgtgccggcccaactgcttggtttgctgctcctctggcttcggggcgcaagatgc

SEQ ID NO: 124 - DNA, 212 bp, Homo sapiens
  source 1..212: mol_type = genomic DNA
gggcagagcgcacatcgcccacagtccccgagaagttggggggaggggtcggcaattgaaccggtgcctagagaaggtggcgcggggtaaactgggaaagtgatgtcgtgtactggctccgcctttttcccgagggtgggggagaaccgtatataagtgcagtagtcgccgtgaacgttctttttcgcaacgggtttgccgccagaacacag

SEQ ID NO: 125 - protein, 49 aa, Homo sapiens
EPPTQKPKKIVNAKKDVVNTKMFEELKSRLDTLAQEVALLKEQQALQTV

SEQ ID NO: 126 - DNA, 147 bp, Homo sapiens
  source 1..147: mol_type = genomic DNA
gagccaccaacccagaagcccaagaagattgtaaatgccaagaaagatgttgtgaacacaaagatgtttgaggagctcaagagccgtctggacaccctggcccaggaggtggccctgctgaaggagcagcaggccctgcagacggtc

SEQ ID NO: 127 - protein, 49 aa, Mus musculus
ESPTPKAKKAANAKKDLVSSKMFEELKNRMDVLAQEVALLKEKQALQTV

SEQ ID NO: 128 - DNA, 147 bp, Mus musculus
  source 1..147: mol_type = genomic DNA
gagtcacccactcccaaggccaagaaggctgcaaatgccaagaaagatttggtgagctcaaagatgttcgaggagctcaagaacaggatggatgtcctggcccaggaggtggccctgctgaaggagaagcaggccttacagactgtg

SEQ ID NO: 129 - protein, 256 aa, Mus musculus
MLPFLSMLVLLVQPLGNLGAEMKSLSQRSVPNTCTLVMCSPTENGLPGRDGRDGREGPRGEKGDPGLPGPMGLSGLQGPTGPVGPKGENGSAGEPGPKGERGLSGPPGLPGIPGPAGKEGPSGKQGNIGPQGKPGPKGEAGPKGEVGAPGMQGSTGAKGSTGPKGERGAPGVQGAPGNAGAAGPAGPAGPQGAPGSRGPPGLKGDRGVPGDRGIKGESGLPDSAALRQQMEALKGKLQRLEVAFSHYQKAALFPDG

SEQ ID NO: 130 - DNA, 768 bp, Mus musculus
  source 1..768: mol_type = genomic DNA
atgctgccctttctctccatgcttgtcttgcttgtacagcccctgggaaatctgggagcagaaatgaagagcctctcgcagagatcagtacccaacacctgcaccctagtcatgtgtagcccaacagagaatggcctgcctggtcgtgatggacgggatgggagagaaggtccacggggtgagaagggtgatccaggtttgccaggacctatggggctctcagggttgcagggccctacaggtccagttggacccaaaggagagaatggctctgctggcgaacctggaccaaagggagaacgtggactaagtggacctccaggacttccaggtattcctggtccagctgggaaagaaggtccctctgggaagcaggggaacataggacctcaaggcaaaccaggtcctaaaggagaggctgggcccaaaggagaagtaggtgctcctggcatgcaaggatctacaggggcaaaaggctccacaggccccaagggagaaagaggtgcccctggtgtgcaaggagccccagggaatgctggagcagcaggacctgccggacctgccggtccacagggagctccaggttccagggggcccccaggactcaagggggacagaggtgttcctggagacagaggaatcaaaggtgaaagcgggcttccagacagtgctgctctgaggcagcagatggaggccttaaaaggaaaactacagcgtctagaggttgccttctcccactatcagaaagctgcattgttccctgatggc

SEQ ID NO: 131 - protein, 375 aa, Homo sapiens
MLLFLLSALVLLTQPLGYLEAEMKTYSHRTMPSACTLVMCSSVESGLPGRDGRDGREGPRGEKGDPGLPGAAGQAGMPGQAGPVGPKGDNGSVGEPGPKGDTGPSGPPGPPGVPGPAGREGPLGKQGNIGPQGKPGPKGEAGPKGEVGAPGMQGSAGARGLAGPKGERGVPGERGVPGNTGAAGSAGAMGPQGSPGARGPPGLKGDKGIPGDKGAKGESGLPDVASLRQQVEALQGQVQHLQAAFSQYKKVELFPNGQSVGEKIFKTAGFVKPFTEAQLLCTQAGGQLASPRSAAENAALQQLVVAKNEAAFLSMTDSKTEGKFTYPTGESLVYSNWAPGEPNDDGGSEDCVEIFTNGKWNDRACGEKRLVVCEF

SEQ ID NO: 132 - DNA, 1125 bp, Homo sapiens
  source 1..1125: mol_type = genomic DNA
atgctgctcttcctcctctctgcactggtcctgctcacacagcccctgggctacctggaagcagaaatgaagacctactcccacagaacaatgcccagtgcttgcaccctggtcatgtgtagctcagtggagagtggcctgcctggtcgcgatggacgggatgggagagagggccctcggggcgagaagggggacccaggtttgccaggagctgcagggcaagcagggatgcctggacaagctggcccagttgggcccaaaggggacaatggctctgttggagaacctggaccaaagggagacactgggccaagtggacctccaggacctcccggtgtgcctggtccagctggaagagaaggtcccctggggaagcaggggaacataggacctcagggcaagccaggcccaaaaggagaagctgggcccaaaggagaagtaggtgccccaggcatgcagggctcggcaggggcaagaggcctcgcaggccctaagggagagcgaggtgtccctggtgagcgtggagtccctggaaacacaggggcagcagggtctgctggagccatgggtccccagggaagtccaggtgccaggggacccccgggattgaagggggacaaaggcattcctggagacaaaggagcaaagggagaaagtgggcttccagatgttgcttctctgaggcagcaggttgaggccttacagggacaagtacagcacctccaggctgctttctctcagtataagaaagttgagctcttcccaaatggccaaagtgtcggggagaagattttcaagacagcaggctttgtaaaaccatttacggaggcacagctgctgtgcacacaggctggtggacagttggcctctccacgctctgccgctgagaatgccgccttgcaacagctggtcgtagctaagaacgaggctgctttcctgagcatgactgattccaagacagagggcaagttcacctaccccacaggagagtccctggtctattccaactgggccccaggggagcccaacgatgatggcgggtcagaggactgtgtggagatcttcaccaatggcaagtggaatgacagggcttgtggagaaaagcgtcttgtggtctgcgagttc

SEQ ID NO: 133 - protein, 155 aa, Homo sapiens
QRFAQAQQQLPLESLGWDVAELQLNHTGPQQDPRLYWQGGPALGRSFLHGPELDKGQLRIHRDGIYMVHIQVTLAICSSTTASRHHPTTLAVGICSPASRSISLLRLSFHQGCTIASQRLTPLARGDTLCTNLTGTLLPSRNTDETFFGVQWVRP

SEQ ID NO: 134 - DNA, 465 bp, Homo sapiens
  source 1..465: mol_type = genomic DNA
cagcgcttcgcacaggctcagcagcagctgccgctcgagtcacttgggtgggacgtagctgagctgcagctgaatcacacaggacctcagcaggaccccaggctatactggcaggggggcccagcactgggccgctccttcctgcatggaccagagctggacaaggggcagctacgtatccatcgtgatggcatctacatggtacacatccaggtgacgctggccatctgttcctccacgacggcctccaggcaccaccccaccaccctggccgtgggaatctgctctcccgcctcccgtagcatcagcctgctgcgtctcagcttccaccaaggttgtaccattgcctcccagcgcctgacgcccctggcccgaggggacacactctgcaccaacctcactgggacacttttgccttcccgaaacactgatgagaccttctttggagtgcagtgggtgcgcccc

SEQ ID NO: 135 - protein, 151 aa, Mus musculus
SKQQQRLLEHPEPHTAELQLNLTVPRKDPTLRWGAGPALGRSFTHGPELEEGHLRIHQDGLYRLHIQVTLANCSSPGSTLQHRATLAVGICSPAAHGISLLRGRFGQDCTVALQRLTYLVHGDVLCTNLTLPLLPSRNADETFFGVQWICP

SEQ ID NO: 136 - DNA, 453 bp, Mus musculus
  source 1..453: mol_type = genomic DNA
agtaagcagcaacagaggctgctggagcaccctgagccgcacacagctgagttacagctgaatctcacagttcctcggaaggaccccacactgcgctggggagcaggcccagccttgggaaggtccttcacacacggaccagagctggaggagggccatctgcgtatccatcaagatggcctctacaggctgcatatccaggtgacactggccaactgctcttccccaggcagcaccctgcagcacagggccaccctggctgtgggcatctgctcccccgctgcgcacggcatcagcttgctgcgtgggcgctttggacaggactgtacagtggcattacagcgcctgacatacctggtccacggagatgtcctctgtaccaacctcaccctgcctctgctgccgtcccgcaacgctgatgagaccttctttggagttcagtggatatgccct

SEQ ID NO: 137 - protein, 597 aa, Mus musculus
MVSVPTASPSASSSSSQCRSSMCQSRYLLFLATLALLNHLSLARVIPVSGPARCLSQSRNLLKTTDDMVKTAREKLKHYSCTAEDIDHEDITRDQTSTLKTCLPLELHKNESCLATRETSSTTRGSCLPPQKTSLMMTLCLGSIYEDLKMYQTEFQAINAALQNHNHQQIILDKGMLVAIDELMQSLNHNGETLRQKPPVGEADPYRVKMKLCILLHAFSTRVVTINRVMGYLSSAAAAGSGATNFSLLKQAGDVEENPGPGSCPQKLTISWFAIVLLVSPLMAMWELEKDVYVVEVDWTPDAPGETVNLTCDTPEEDDITWTSDQRHGVIGSGKTLTITVKEFLDAGQYTCHKGGETLSHSHLLLHKKENGIWSTEILKNFKNKTFLKCEAPNYSGRFTCSWLVQRNMDLKFNIKSSSSSPDSRAVTCGMASLSAEKVTLDQRDYEKYSVSCQEDVTCPTAEETLPIELALEARQQNKYENYSTSFFIRDIIKPDPPKNLQMKPLKNSQVEVSWEYPDSWSTPHSYFSLKFFVRIQRKKEKMKETEEGCNQKGAFLVEKTSTEVQCKGGNVCVQAQDRYYNSSCSKWACVPCRVRS

SEQ ID NO: 138 - DNA, 1794 bp, Mus musculus
  source 1..1794: mol_type = genomic DNA
atggtcagcgttccaacagcctcaccctcggcatccagcagctcctctcagtgccggtccagcatgtgtcaatcacgctacctcctctttttggccacccttgccctcctaaaccacctcagtttggccagggtcattccagtctctggacctgccaggtgtcttagccagtcccgaaacctgctgaagaccacagatgacatggtgaagacggccagagaaaaactgaaacattattcctgcactgctgaagacatcgatcatgaagacatcacacgggaccaaaccagcacattgaagacctgtttaccactggaactacacaagaacgagagttgcctggctactagagagacttcttccacaacaagagggagctgcctgcccccacagaagacgtctttgatgatgaccctgtgccttggtagcatctatgaggacttgaagatgtaccagacagagttccaggccatcaacgcagcacttcagaatcacaaccatcagcagatcattcttgacaagggcatgctggtggccatcgatgagctgatgcagtctctgaatcataatggcgagactctgcgccagaaacctcctgtgggagaagcagacccttacagagtgaaaatgaagctctgcatcctgcttcacgccttcagcacccgcgtcgtgaccatcaacagggtgatgggctatctgagctccgccgcggccgcaggatctggggccaccaacttttcattgctcaagcaggcgggcgatgtggaggaaaaccctggccccggatcctgtcctcagaagctaaccatctcctggtttgccatcgttttgctggtgtctccactcatggccatgtgggagctggagaaagacgtttatgttgtagaggtggactggactcccgatgcccctggagaaacagtgaacctcacctgtgacacgcctgaagaagatgacatcacctggacctcagaccagagacatggagtcataggctctggaaagaccctgaccatcactgtcaaagagtttcttgatgctggccagtacacctgccacaaaggaggcgagactctgagccactcacatctgctgctccacaagaaggaaaatggaatttggtccactgaaattttaaagaatttcaagaacaagactttcctgaagtgtgaagcaccaaattactccggacggttcacgtgctcatggctggtgcaaagaaacatggacttgaagttcaacatcaagagcagtagcagttcccctgactctcgggcagtgacatgtggaatggcgtctctgtctgcagagaaggtcacactggaccaaagggactatgagaagtattcagtgtcctgccaggaggatgtcacctgcccaactgccgaggagaccctgcccattgaactggcgttggaagcacggcagcagaataaatatgagaactacagcaccagcttcttcatcagggacatcatcaaaccagacccgcccaagaacttgcagatgaagcctttgaagaactcacaggtggaggtcagctgggagtaccctgactcctggagcactccccattcctacttctccctcaagttctttgttcgaatccagcgcaagaaagaaaagatgaaggagacagaggaggggtgtaaccagaaaggtgcgttcctcgtagagaagacatctaccgaagtccaatgcaaaggcgggaatgtctgcgtgcaagctcaggatcgctattacaattcctcatgcagcaagtgggcatgtgttccctgcagggtccgatcctag

SEQ ID NO: 139 - protein, 239 aa, Mus musculus
MVSVPTASPSASSSSSQCRSSMCQSRYLLFLATLALLNHLSLARVIPVSGPARCLSQSRNLLKTTDDMVKTAREKLKHYSCTAEDIDHEDITRDQTSTLKTCLPLELHKNESCLATRETSSTTRGSCLPPQKTSLMMTLCLGSIYEDLKMYQTEFQAINAALQNHNHQQIILDKGMLVAIDELMQSLNHNGETLRQKPPVGEADPYRVKMKLCILLHAFSTRVVTINRVMGYLSSAAAA

SEQ ID NO: 140 - DNA, 717 bp, Mus musculus
  source 1..717: mol_type = genomic DNA
atggtcagcgttccaacagcctcaccctcggcatccagcagctcctctcagtgccggtccagcatgtgtcaatcacgctacctcctctttttggccacccttgccctcctaaaccacctcagtttggccagggtcattccagtctctggacctgccaggtgtcttagccagtcccgaaacctgctgaagaccacagatgacatggtgaagacggccagagaaaaactgaaacattattcctgcactgctgaagacatcgatcatgaagacatcacacgggaccaaaccagcacattgaagacctgtttaccactggaactacacaagaacgagagttgcctggctactagagagacttcttccacaacaagagggagctgcctgcccccacagaagacgtctttgatgatgaccctgtgccttggtagcatctatgaggacttgaagatgtaccagacagagttccaggccatcaacgcagcacttcagaatcacaaccatcagcagatcattcttgacaagggcatgctggtggccatcgatgagctgatgcagtctctgaatcataatggcgagactctgcgccagaaacctcctgtgggagaagcagacccttacagagtgaaaatgaagctctgcatcctgcttcacgccttcagcacccgcgtcgtgaccatcaacagggtgatgggctatctgagctccgccgcggccgca

SEQ ID NO: 141 - protein, 23 aa, synthetic construct
  REGION 1..23: note = Exemplary P2A Protein Sequence
GSGATNFSLLKQAGDVEENPGPG

SEQ ID NO: 142 - DNA, 69 bp, synthetic construct
  misc_feature 1..69: note = Exemplary P2A DNA Sequence
  source 1..69: mol_type = other DNA
ggatctggggccaccaacttttcattgctcaagcaggcgggcgatgtggaggaaaaccctggccccgga

SEQ ID NO: 143 - protein, 335 aa, synthetic construct
  REGION 1..335: note = IL-12p40 Protein Sequence
SCPQKLTISWFAIVLLVSPLMAMWELEKDVYVVEVDWTPDAPGETVNLTCDTPEEDDITWTSDQRHGVIGSGKTLTITVKEFLDAGQYTCHKGGETLSHSHLLLHKKENGIWSTEILKNFKNKTFLKCEAPNYSGRFTCSWLVQRNMDLKFNIKSSSSSPDSRAVTCGMASLSAEKVTLDQRDYEKYSVSCQEDVTCPTAEETLPIELALEARQQNKYENYSTSFFIRDIIKPDPPKNLQMKPLKNSQVEVSWEYPDSWSTPHSYFSLKFFVRIQRKKEKMKETEEGCNQKGAFLVEKTSTEVQCKGGNVCVQAQDRYYNSSCSKWACVPCRVRS

SEQ ID NO: 144 - DNA, 1009 bp, synthetic construct
  misc_feature 1..1009: note = IL-12p40 DNA Sequence
  source 1..1009: mol_type = other DNA
atcctgtcctcagaagctaaccatctcctggtttgccatcgttttgctggtgtctccactcatggccatgtgggagctggagaaagacgtttatgttgtagaggtggactggactcccgatgcccctggagaaacagtgaacctcacctgtgacacgcctgaagaagatgacatcacctggacctcagaccagagacatggagtcataggctctggaaagaccctgaccatcactgtcaaagagtttcttgatgctggccagtacacctgccacaaaggaggcgagactctgagccactcacatctgctgctccacaagaaggaaaatggaatttggtccactgaaattttaaagaatttcaagaacaagactttcctgaagtgtgaagcaccaaattactccggacggttcacgtgctcatggctggtgcaaagaaacatggacttgaagttcaacatcaagagcagtagcagttcccctgactctcgggcagtgacatgtggaatggcgtctctgtctgcagagaaggtcacactggaccaaagggactatgagaagtattcagtgtcctgccaggaggatgtcacctgcccaactgccgaggagaccctgcccattgaactggcgttggaagcacggcagcagaataaatatgagaactacagcaccagcttcttcatcagggacatcatcaaaccagacccgcccaagaacttgcagatgaagcctttgaagaactcacaggtggaggtcagctgggagtaccctgactcctggagcactccccattcctacttctccctcaagttctttgttcgaatccagcgcaagaaagaaaagatgaaggagacagaggaggggtgtaaccagaaaggtgcgttcctcgtagagaagacatctaccgaagtccaatgcaaaggcgggaatgtctgcgtgcaagctcaggatcgctattacaattcctcatgcagcaagtgggcatgtgttccctgcagggtccgatcctag

SEQ ID NO: 145 - protein, 567 aa, Homo sapiens
MCPARSLLLVATLVLLDHLSLARNLPVATPDPGMFPCLHHSQNLLRAVSNMLQKARQTLEFYPCTSEEIDHEDITKDKTSTVEACLPLELTKNESCLNSRETSFITNGSCLASRKTSFMMALCLSSIYEDLKMYQVEFKTMNAKLLMDPKRQIFLDQNMLAVIDELMQALNFNSETVPQKSSLEEPDFYKTKIKLCILLHAFRIRAVTIDRVMSYLNASATNFSLLKQAGDVEENPGPGMCHQQLVISWFSLVFLASPLVAIWELKKDVYVVELDWYPDAPGEMVVLTCDTPEEDGITWTLDQSSEVLGSGKTLTIQVKEFGDAGQYTCHKGGEVLSHSLLLLHKKEDGIWSTDILKDQKEPKNKTFLRCEAKNYSGRFTCWWLTTISTDLTFSVKSSRGSSDPQGVTCGAATLSAERVRGDNKEYEYSVECQEDSACPAAEESLPIEVMVDAVHKLKYENYTSSFFIRDIIKPDPPKNLQLKPLKNSRQVEVSWEYPDTWSTPHSYFSLTFCVQVQGKSKREKKDRVFTDKTSATVICRKNASISVRAQDRYYSSSWSEWASVPCS

SEQ ID NO: 146 - DNA, 1701 bp, Homo sapiens
  source 1..1701: mol_type = genomic DNA
atgtgcccggcgcgcagcctgctgctggtggcgaccctggtgctgctggatcatctgagcctggcgcgcaacctgccggtggcgaccccggatccgggcatgtttccgtgcctgcatcatagccagaacctgctgcgcgcggtgagcaacatgctgcagaaagcgcgccagaccctggaattttatccgtgcaccagcgaagaaattgatcatgaagatattaccaaagataaaaccagcaccgtggaagcgtgcctgccgctggaactgaccaaaaacgaaagctgcctgaacagccgcgaaaccagctttattaccaacggcagctgcctggcgagccgcaaaaccagctttatgatggcgctgtgcctgagcagcatttatgaagatctgaaaatgtatcaggtggaatttaaaaccatgaacgcgaaactgctgatggatccgaaacgccagatttttctggatcagaacatgctggcggtgattgatgaactgatgcaggcgctgaactttaacagcgaaaccgtgccgcagaaaagcagcctggaagaaccggatttttataaaaccaaaattaaactgtgcattctgctgcatgcgtttcgcattcgcgcggtgaccattgatcgcgtgatgagctatctgaacgcgagcgcgaccaactttagcctgctgaaacaggcgggcgatgtggaagaaaacccgggcccgggcatgtgccatcagcagctggtgattagctggtttagcctggtgtttctggcgagcccgctggtggcgatttgggaactgaaaaaagatgtgtatgtggtggaactggattggtatccggatgcgccgggcgaaatggtggtgctgacctgcgataccccggaagaagatggcattacctggaccctggatcagagcagcgaagtgctgggcagcggcaaaaccctgaccattcaggtgaaagaatttggcgatgcgggccagtatacctgccataaaggcggcgaagtgctgagccatagcctgctgctgctgcataaaaaagaagatggcatttggagcaccgatattctgaaagatcagaaagaaccgaaaaacaaaacctttctgcgctgcgaagcgaaaaactatagcggccgctttacctgctggtggctgaccaccattagcaccgatctgacctttagcgtgaaaagcagccgcggcagcagcgatccgcagggcgtgacctgcggcgcggcgaccctgagcgcggaacgcgtgcgcggcgataacaaagaatatgaatatagcgtggaatgccaggaagatagcgcgtgcccggcggcggaagaaagcctgccgattgaagtgatggtggatgcggtgcataaactgaaatatgaaaactataccagcagcttttttattcgcgatattattaaaccggatccgccgaaaaacctgcagctgaaaccgctgaaaaacagccgccaggtggaagtgagctgggaatatccggatacctggagcaccccgcatagctattttagcctgaccttttgcgtgcaggtgcagggcaaaagcaaacgcgaaaaaaaagatcgcgtgtttaccgataaaaccagcgcgaccgtgatttgccgcaaaaacgcgagcattagcgtgcgcgcgcaggatcgctattatagcagcagctggagcgaatgggcgagcgtgccgtgcagc

SEQ ID NO: 147 - protein, 219 aa, Homo sapiens
MCPARSLLLVATLVLLDHLSLARNLPVATPDPGMFPCLHHSQNLLRAVSNMLQKARQTLEFYPCTSEEIDHEDITKDKTSTVEACLPLELTKNESCLNSRETSFITNGSCLASRKTSFMMALCLSSIYEDLKMYQVEFKTMNAKLLMDPKRQIFLDQNMLAVIDELMQALNFNSETVPQKSSLEEPDFYKTKIKLCILLHAFRIRAVTIDRVMSYLNAS

SEQ ID NO: 148 - DNA, 657 bp, Homo sapiens
  source 1..657: mol_type = genomic DNA
atgtgcccggcgcgcagcctgctgctggtggcgaccctggtgctgctggatcatctgagcctggcgcgcaacctgccggtggcgaccccggatccgggcatgtttccgtgcctgcatcatagccagaacctgctgcgcgcggtgagcaacatgctgcagaaagcgcgccagaccctggaattttatccgtgcaccagcgaagaaattgatcatgaagatattaccaaagataaaaccagcaccgtggaagcgtgcctgccgctggaactgaccaaaaacgaaagctgcctgaacagccgcgaaaccagctttattaccaacggcagctgcctggcgagccgcaaaaccagctttatgatggcgctgtgcctgagcagcatttatgaagatctgaaaatgtatcaggtggaatttaaaaccatgaacgcgaaactgctgatggatccgaaacgccagatttttctggatcagaacatgctggcggtgattgatgaactgatgcaggcgctgaactttaacagcgaaaccgtgccgcagaaaagcagcctggaagaaccggatttttataaaaccaaaattaaactgtgcattctgctgcatgcgtttcgcattcgcgcggtgaccattgatcgcgtgatgagctatctgaacgcgagc

SEQ ID NO: 149 - protein, 328 aa, Homo sapiens
MCHQQLVISWFSLVFLASPLVAIWELKKDVYVVELDWYPDAPGEMVVLTCDTPEEDGITWTLDQSSEVLGSGKTLTIQVKEFGDAGQYTCHKGGEVLSHSLLLLHKKEDGIWSTDILKDQKEPKNKTFLRCEAKNYSGRFTCWWLTTISTDLTFSVKSSRGSSDPQGVTCGAATLSAERVRGDNKEYEYSVECQEDSACPAAEESLPIEVMVDAVHKLKYENYTSSFFIRDIIKPDPPKNLQLKPLKNSRQVEVSWEYPDTWSTPHSYFSLTFCVQVQGKSKREKKDRVFTDKTSATVICRKNASISVRAQDRYYSSSWSEWASVPCS

SEQ ID NO: 150 - DNA, 984 bp, Homo sapiens
  source 1..984: mol_type = genomic DNA
atgtgccatcagcagctggtgattagctggtttagcctggtgtttctggcgagcccgctggtggcgatttgggaactgaaaaaagatgtgtatgtggtggaactggattggtatccggatgcgccgggcgaaatggtggtgctgacctgcgataccccggaagaagatggcattacctggaccctggatcagagcagcgaagtgctgggcagcggcaaaaccctgaccattcaggtgaaagaatttggcgatgcgggccagtatacctgccataaaggcggcgaagtgctgagccatagcctgctgctgctgcataaaaaagaagatggcatttggagcaccgatattctgaaagatcagaaagaaccgaaaaacaaaacctttctgcgctgcgaagcgaaaaactatagcggccgctttacctgctggtggctgaccaccattagcaccgatctgacctttagcgtgaaaagcagccgcggcagcagcgatccgcagggcgtgacctgcggcgcggcgaccctgagcgcggaacgcgtgcgcggcgataacaaagaatatgaatatagcgtggaatgccaggaagatagcgcgtgcccggcggcggaagaaagcctgccgattgaagtgatggtggatgcggtgcataaactgaaatatgaaaactataccagcagcttttttattcgcgatattattaaaccggatccgccgaaaaacctgcagctgaaaccgctgaaaaacagccgccaggtggaagtgagctgggaatatccggatacctggagcaccccgcatagctattttagcctgaccttttgcgtgcaggtgcagggcaaaagcaaacgcgaaaaaaaagatcgcgtgtttaccgataaaaccagcgcgaccgtgatttgccgcaaaaacgcgagcattagcgtgcgcgcgcaggatcgctattatagcagcagctggagcgaatgggcgagcgtgccgtgcagc

SEQ ID NO: 151 - protein, 158 aa, Homo sapiens
TQDCSFQHSPISSDFAVKIRELSDYLLQDYPVTVASNLQDEELCGGLWRLVLAQRWMERLKTVAGSKMQGLLERVNTEIHFVTKCAFQPPPSCLRFVQTNISRLLQETSEQLVALKPWITRQNFSRCLELQCQPDSSTLPPPWSPRPLEATAPTAPQP

SEQ ID NO: 152 - DNA, 345 bp, Homo sapiens
  source 1..345: mol_type = genomic DNA
atgacagtgctggcgccagcctggagcccaacaacctatctcctcctgctgctgctgctgagctcgggactcagtgggacccaggactgctccttccaacacagccccatctcctccgacttcgctgtcaaaatccgtgagctgtctgactacctgcttcaagattacccagtcaccgtggcctccaacctgcaggacgaggagctctgcgggggcctctggcggctggtcctggcacagcgctggatggagcggctcaagactgtcgctgggtccaagatgcaaggcttgctggagcgcgtgaacacggagatacactttgtcaccaaatgtgcctttcagccc

SEQ ID NO: 153 - protein, 148 aa, Mus musculus
SSSPAKDPPIQRLRGAVTRCEDGQLFISSYKNEYQTMEVQNNSVVIKCDGLYIIYLKGSFFQEVKIDLHFREDHNPISIPMLNDGRRIVFTVVASLAFKDKVYLTVNAPDTLCEHLQINDGELIVVQLTPGYCAPEGSYHSTVNQVPL

SEQ ID NO: 154 - DNA, 444 bp, Mus musculus
  source 1..444: mol_type = genomic DNA
agcagcagccctgccaaggaccctcctattcagaggctgaggggcgccgtgacaaggtgcgaggacggacagctgttcatcagcagctacaagaacgagtatcagaccatggaggtgcagaacaacagcgtggtgatcaagtgcgacggcctgtacatcatctacctgaagggcagcttcttccaagaggtgaagatcgacctgcactttagggaggaccacaaccctatcagcatccctatgctgaacgacggaaggaggatcgtgttcaccgtggtggctagcctggccttcaaggacaaggtgtacctgaccgtgaacgcccctgacaccctgtgcgagcacctgcagatcaacgacggcgagctgatcgtggtgcagctgacccctggctactgcgcccctgagggcagctaccacagcaccgtgaaccaagtgcctctg

SEQ ID NO: 155 - protein, 133 aa, Homo sapiens
QVSHRYPRIQSIKVQFTEYKKEKGFILTSQKEDEIMKVQNNSVIINCDGFYLISLKGYFSQEVNISLHYQKDEEPLFQLKKVRSVNSLMVASLTYKDKVYLNVTTDNTSLDDFHVNGGELILIHQNPGEFCVL

SEQ ID NO: 156 - DNA, 399 bp, Homo sapiens
  source 1..399: mol_type = genomic DNA
caggtatcacatcggtatcctcgaattcaaagtatcaaagtacaatttaccgaatataagaaggagaaaggtttcatcctcacttcccaaaaggaggatgaaatcatgaaggtgcagaacaactcagtcatcatcaactgtgatgggttttatctcatctccctgaagggctacttctcccaggaagtcaacattagccttcattaccagaaggatgaggagcccctcttccaactgaagaaggtcaggtctgtcaactccttgatggtggcctctctgacttacaaagacaaagtctacttgaatgtgaccactgacaatacctccctggatgacttccatgtgaatggcggagaactgattcttatccatcaaaatcctggtgaattctgtgtcctt

SEQ ID NO: 157 - protein, 209 aa, Mus musculus
VDEQLSKSVKDKVLLPCRYNSPHEDESEDRIYWQKHDKVVLSVIAGKLKVWPEYKNRTLYDNTTYSLIILGLVLSDRGTYSCVVQKKERGTYEVKHLALVKLSIKADFSTPNITESGNPSADTKRITCFASGGFPKPRFSWLENGRELPGINTTISQDPESELYTISSQLDFNTTRNHTIKCLIKYGDAHVSEDFTWEKPPEDPPDSKN

SEQ ID NO: 158 - DNA, 627 bp, Mus musculus
  source 1..627: mol_type = genomic DNA
gtggacgagcagctgagcaagagcgtgaaggacaaggtgctgctgccttgtaggtacaacagccctcacgaggacgagagcgaggataggatctactggcagaagcacgacaaggtagtgctgagtgtgatagccggcaagctgaaggtgtggcctgagtacaagaataggaccctgtacgacaacaccacctacagcctgatcatcctgggcctggtgctgagcgataggggtacctacagctgcgtggtgcagaagaaggagaggggcacctacgaggtgaagcacctggccctggtgaagctgagcatcaaggccgacttcagcacccctaacatcaccgagagcggcaaccctagcgccgacaccaagaggatcacctgcttcgctagcggcggcttccctaagcctaggttcagctggctggagaacggaagggagctgcctggcataaacacgaccatatctcaagaccctgagagcgagctgtacaccatcagctctcagctggacttcaacaccacccgcaatcacaccatcaagtgcctgatcaagtacggcgacgcccacgtgagcgaggacttcacctgggagaagcctcctgaggaccctcctgacagcaagaac

SEQ ID NO: 159 - protein, 208 aa, Homo sapiens [sequence omitted]

SEQ ID NO: 160 - DNA, 624 bp, Homo sapiens
  source 1..624: mol_type = genomic DNA
gttatccacgtgaccaaggaagtgaaagaagtggcaacgctgtcctgtggtcacaatgtttctgttgaagagctggcacaaactcgcatctactggcaaaaggagaagaaaatggtgctgactatgatgtctggggacatgaatatatggcccgagtacaagaaccggaccatctttgatatcactaataacctctccattgtgatcctggctctgcgcccatctgacgagggcacatacgagtgtgttgttctgaagtatgaaaaagacgctttcaagcgggaacacctggctgaagtgacgttatcagtcaaagctgacttccctacacctagtatatctgactttgaaattccaacttctaatattagaaggataatttgctcaacctctggaggttttccagagcctcacctctcctggttggaaaatggagaagaattaaatgccatcaacacaacagtttcccaagatcctgaaactgagctctatgctgttagcagcaaactggatttcaatatgacaaccaaccacagcttcatgtgtctcatcaagtatggacatttaagagtgaatcagaccttcaactggaatacaaccaagcaagagcattttcctgataac

SEQ ID NO: 161 - protein, 244 aa, Mus musculus
MDPRCTMGLAILIFVTVLLISDAVSVETQAYFNGTAYLPCPFTKAQNISLSELVVFWQDQQKLVLYEHYLGTEKLDSVNAKYLGRTSFDRNNWTLRLHNVQIKDMGSYDCFIQKKPPTGSIILQQTLTELSVIANFSEPEIKLAQNVTGNSGINLTCTSKQGHPKPKKMYFLITNSTNEYGDNMQISQDNVTELFSISNSLSLSFPDGVWHMTVVCVLETESMKISSKPLNFTQEFPSPQTYWK

SEQ ID NO: 162 - DNA, 733 bp, Mus musculus
  source 1..733: mol_type = genomic DNA
atggatccgcgctgcaccatgggcctggcgattctgatttttgtgaccgtgctgctgattagcgatgcggtgagcgtggaaacccaggcgtattttaacggcaccgcgtatctgccgtgcccgtttaccaaagcgcagaacattagcctgagcgaactggtggtgttttggcaggatcagcagaaactggtgctgtatgaacattatctgggcaccgaaaaactggatagcgtgaacgcgaaatatctgggccgcaccagctttgatcgcaacaactggaccctgcgcctgcataacgtgcagattaaagatatgggcagctatgattgctttattcagaaaaaaccgccgaccggcagcattattctgcagcagaccctgaccgaactgagcgtgattgcgaactttagcgaaccggaaattaaactggcgcagaacgtgaccggcaacagcggcattaacctgacctgcaccagcaaacagggccatccgaaaccgaaaaaaatgtattttctgattaccaacagcaccaacgaatatggcgataacatgcagattagccaggataacgtgaccgaactgtttagcattagcaacagcctgagcctgagctttccggatggcgtgtggcatatgaccgtggtgtgcgtgctggaaaccgaaagcatgaaaattagcagcaaaccgctgaactttacccaggaatttccgagcccgcagacctattggaaag

SEQ ID NO: 163 - protein, 157 aa, Mus musculus
NFGRLHCTTAVIRNINDQVLFVDKRQPVFEDMTDIDQSASEPQTRLIIYMYKDSEVRGLAVTLSVKDSKMSTLSCKNKIISFEEMDPPENIDDIQSDLIFFQKRVPGHNKMEFESSLYEGHFLACQKEDDAFKLILKKKDENGDKSVMFTLTNLHQS

SEQ ID NO: 164 - DNA, 579 bp, Mus musculus
  source 1..579: mol_type = genomic DNA
atggctgccatgtcagaagactcttgcgtcaacttcaaggaaatgatgtttattgacaacacgctttactttatacctgaagaaaatggagacctggaatcagacaactttggccgacttcactgtacaaccgcagtaatacggaatataaatgaccaagttctcttcgttgacaaaagacagcctgtgttcgaggatatgactgatattgatcaaagtgccagtgaaccccagaccagactgataatatacatgtacaaagacagtgaagtaagaggactggctgtgaccctctctgtgaaggatagtaaaatgtctaccctctcctgtaagaacaagatcatttcctttgaggaaatggatccacctgaaaatattgatgatatacaaagtgatctcatattctttcagaaacgtgttccaggacacaacaagatggagtttgaatcttcactgtatgaaggacactttcttgcttgccaaaaggaagatgatgctttcaaactcattctgaaaaaaaaggatgaaaatggggataaatctgtaatgttcactctcactaacttacatcaaagttag

SEQ ID NO: 165 - protein, 157 aa, Homo sapiens
YFGKLESKLSVIRNLNDQVLFIDQGNRPLFEDMTDSDCRDNAPRTIFIISMYKDSQPRGMAVTISVKCEKISTLSCENKIISFKEMNPPDNIKDTKSDIIFFQRSVPGHDNKMQFESSSYEGYFLACEKERDLFKLILKKEDELGDRSIMFTVQNED

SEQ ID NO: 166 - DNA, 474 bp, Homo sapiens
  source 1..474: mol_type = genomic DNA
aactttggccgacttcactgtacaaccgcagtaatacggaatataaatgaccaagttctcttcgttgacaaaagacagcctgtgttcgaggatatgactgatattgatcaaagtgccagtgaaccccagaccagactgataatatacatgtacaaagacagtgaagtaagaggactggctgtgaccctctctgtgaaggatagtaaaatgtctaccctctcctgtaagaacaagatcatttcctttgaggaaatggatccacctgaaaatattgatgatatacaaagtgatctcatattctttcagaaacgtgttccaggacacaacaagatggagtttgaatcttcactgtatgaaggacactttcttgcttgccaaaaggaagatgatgctttcaaactcattctgaaaaaaaaggatgaaaatggggataaatctgtaatgttcactctcactaacttacatcaaagttag

SEQ ID NO: 167 - protein, 114 aa, Mus musculus
NWIDVRYDLEKIESLIQSIHIDTTLYTDSDFHPSCKVTAMNCFLLELQVILHEYSNMTLNETVRNVLYLANSTLSSNKNVAESGCKECEELEEKTFTEFLQSFIRIVQMFINTS

SEQ ID NO: 168 - DNA, 342 bp, Mus musculus
  source 1..342: mol_type = genomic DNA
aactggatagatgtaagatatgacctggagaaaattgaaagccttattcaatctattcatattgacaccactttatacactgacagtgactttcatcccagttgcaaagttactgcaatgaactgctttctcctggaattgcaggttattttacatgagtacagtaacatgactcttaatgaaacagtaagaaacgtgctctaccttgcaaacagcactctgtcttctaacaagaatgtagcagaatctggctgcaaggaatgtgaggagctggaggagaaaaccttcacagagtttttgcaaagctttatacgcattgtccaaatgttcatcaacacgtcc

SEQ ID NO: 169 - protein, 114 aa, Homo sapiens
NWVNVISDLKKIEDLIQSMHIDATLYTESDVHPSCKVTAMKCFLLELQVISLESGDASIHDTVENLIILANNSLSSNGNVTESGCKECEELEEKNIKEFLQSFVHIVQMFINTS

SEQ ID NO: 170 - DNA, 342 bp, Homo sapiens
  source 1..342: mol_type = genomic DNA
aactgggtgaatgtaataagtgatttgaaaaaaattgaagatcttattcaatctatgcatattgatgctactttatatacggaaagtgatgttcaccccagttgcaaagtaacagcaatgaagtgctttctcttggagttacaagttatttcacttgagtccggagatgcaagtattcatgatacagtagaaaatctgatcatcctagcaaacaacagtttgtcttctaatgggaatgtaacagaatctggatgcaaagaatgtgaggaactggaggaaaaaaatattaaagaatttttgcagagttttgtacatattgtccaaatgttcatcaacacttct

SEQ ID NO: 171 - protein, 129 aa, Mus musculus
ECHIKDKEGKAYESVLMISIDELDKMTGTDSNCPNNEPNFFRKHVCDDTKEAAFLNRAARKLKQFLKMNISEEFNVHLLTVSQGTQTLVNCTSKEEKNVKEQKKNDACFLKRLLREIKTCWNKILKGSI

SEQ ID NO: 172 - DNA, 390 bp, Mus musculus
  source 1..390: mol_type = genomic DNA
gagtgccacattaaagacaaagaaggtaaagcatatgagagtgtactgatgatcagcatcgatgaattggacaaaatgacaggaactgatagtaattgcccgaataatgaaccaaacttttttagaaaacatgtatgtgatgatacaaaggaagctgcttttctaaatcgtgctgctcgcaagttgaagcaatttcttaaaatgaatatcagtgaagaattcaatgtccacttactaacagtatcacaaggcacacaaacactggtgaactgcacaagtaaggaagaaaaaaacgtaaaggaacagaaaaagaatgatgcatgtttcctaaagagactactgagagaaataaaaacttgttggaataaaattttgaagggcagtatataa

SEQ ID NO: 173 - protein, 152 aa, Homo sapiens
DCDIEGKDGKQYESVLMVSIDQLLDSMKEIGSNCLNNEFNFFKRHICDANKEGMFLFRAARKLRQFLKMNSTGDFDLHLLKVSEGTTILLNCTGQVKGRKPAALGEAQPTKSLEENKSLKEQKKLNDLCFLKRLLQEIKTCWNKILMGTKEH

SEQ ID NO: 174 - DNA, 459 bp, Homo sapiens
  source 1..459: mol_type = genomic DNA
gattgtgatattgaaggtaaagatggcaaacaatatgagagtgttctaatggtcagcatcgatcaattattggacagcatgaaagaaattggtagcaattgcctgaataatgaatttaacttttttaaaagacatatctgtgatgctaataaggaaggtatgtttttattccgtgctgctcgcaagttgaggcaatttcttaaaatgaatagcactggtgattttgatctccacttattaaaagtttcagaaggcacaacaatactgttgaactgcactggccaggttaaaggaagaaaaccagctgccctgggtgaagcccaaccaacaaagagtttggaagaaaataaatctttaaaggaacagaaaaaactgaatgacttgtgtttcctaaagagactattacaagagataaaaacttgttggaataaaattttgatgggcactaaagaacactga

SEQ ID NO: 175 - protein, 165 aa, Mus musculus
AASVDTLSIQGTSLLTQSPASLSTYNDQSVSFVLENGCYVINVDDSGKDQEQDQVLLRYYESPCPASQSGDGVDGKKLMVNMSPIKDTDIWLHANDKDYSVELQRGDVSPPEQAFFVLHKKSSDFVSFECKNLPGTYIGVKDNQLALVEEKDESCNNIMFKLSKI

SEQ ID NO: 176 - DNA, 498 bp, Mus musculus
  source 1..498: mol_type = genomic DNA
gctgcgtctgttgacacattgagcatccaaggaacttcacttttaacacagtctcctgcctccctgagtacatacaatgaccaatctgttagttttgttttggagaatggatgttatgtgatcaatgttgacgactctggaaaagaccaagagcaagaccaggtgctactacgctactatgagtctccctgtcctgcaagtcaatcaggcgacggtgtggatgggaagaagctgatggtgaacatgagttccatcaaagacacagacatctggctgcatgccaacgacaaggactactccgtggagcttcaaaggggtgacgtctcgcctccggaacaggccttcttcgtccttcacaaaaagtcctcggactttgtttcatttgaatgcaagaatcttcctggcacttacataggagtgaaggacaaccagctggctctagtggaggaaaaagatgagagctgcaacaatattatgtttaagctctcgaaaatctaa

SEQ ID NO: 177 - protein, 176 aa, Homo sapiens
AFGISGVQKYTRALHDSSITGISPITEYLASLSTYNDQSITFALEDESYEIYVEDLKKDEKKDKVLLSYYESQHPSNESGDGVDGKMLMVTLSPTKDFWLHANNKEHSVELHKCEKPLPDQAFFVLHNMHSNCVSFECKTDPGVFIGVKDNHLALIKVDSSENLCTENILFKLSET

SEQ ID NO: 178 - DNA, 528 bp, Homo sapiens
  source 1..528: mol_type = genomic DNA
gcctttggtatatcaggggtccagaaatatactagagcacttcatgattcaagtatcacaggaatttcacctattacagagtatcttgcttctctaagcacatacaatgatcaatccattacttttgctttggaggatgaaagttatgagatatatgttgaagacttgaaaaaagatgaaaagaaagataaggtgttactgagttactatgagtctcaacacccctcaaatgaatcaggtgacggtgttgatggtaagatgttaatggtaaccctgagtcctacaaaagacttctggttgcatgccaacaacaaggaacactctgtggagctccataagtgtgaaaaaccactgccagaccaggccttctttgtccttcataatatgcactccaactgtgtttcatttgaatgcaagactgatcctggagtgtttataggtgtaaaggataatcatcttgctctgattaaagtagactcttctgagaatttgtgtactgaaaatatcttgtttaagctctctgaaact

SEQ ID NO: 179 - protein, 129 aa, Mus musculus
HKSSPQGPDRLLIRLRHLIDIVEQLKIYENDLDPELLSAPQDVKGHCEHAAFACFQKAKLKPSNPGNNKTFIIDLVAQLRRRLPARRGGKKQKHIAKCPSCDSYEKRTPKEFLERLKWLLQKMIHQHLS

SEQ ID NO: 180 - DNA, 387 bp, Mus musculus
  source 1..387: mol_type = genomic DNA
cataaatcaagcccccaagggccagatcgcctcctgattagacttcgtcaccttattgacattgttgaacagctgaaaatctatgaaaatgacttggatcctgaacttctatcagctccacaagatgtaaaggggcactgtgagcatgcagcttttgcctgttttcagaaggccaaactcaagccatcaaaccctggaaacaataagacattcatcattgacctcgtggcccagctcaggaggaggctgcctgccaggaggggaggaaagaaacagaagcacatagctaaatgcccttcctgtgattcgtatgagaaaaggacacccaaagaattcctagaaagactaaaatggctccttcaaaagatgattcatcagcatctctcc

SEQ ID NO: 181 - protein, 138 aa, Homo sapiens
HKSSSQGQDRHMIRMRQLIDIVDQLKNYVNDLVPEFLPAPEDVETNCEWSAFSCFQKAQLKSANTGNNERIINVSIKKLKRKPPSTNAGRRQKHRLTCPSCDSYEKKPPKEFLERFKSLLQKMIHQHLSSRTHGSEDS

SEQ ID NO: 182 - DNA, 414 bp, Homo sapiens
  source 1..414: mol_type = genomic DNA
cacaaatcaagctcccaaggtcaagatcgccacatgattagaatgcgtcaacttatagatattgttgatcagctgaaaaattatgtgaatgacttggtccctgaatttctgccagctccagaagatgtagagacaaactgtgagtggtcagctttttcctgttttcagaaggcccaactaaagtcagcaaatacaggaaacaatgaaaggataatcaatgtatcaattaaaaagctgaagaggaaaccaccttccacaaatgcagggagaagacagaaacacagactaacatgcccttcatgtgattcttatgagaaaaaaccacccaaagaattcctagaaagattcaaatcacttctccaaaagatgattcatcagcatctgtcctctagaacacacggaagtgaagattcc

SEQ ID NO: 183 - protein, 549 aa, Mus musculus
MLDCRAVIMLWLLPWVTQGLAVPRSSSPDWAQCQQLSRNLCMLAWNAHAPAGHMNLLREEEDEETKNNVPRIQCEDGCDPQGLKDNSQFCLQRIRQGLAFYKHLLDSDIFKGEPALLPDSPMEQLHTSLLGLSQLLQPEDHPRETQQMPSLSSSQQWQRPLLRSKILRSLQAFLAIAARVFAHGAATLTEPLVPTAATNFSLLKQAGDVEENPGPCPQKLTISWFAIVLLVSPLMAMWELEKDVYVVEVDWTPDAPGETVNLTCDTPEEDDITWTSDQRHGVIGSGKTLTITVKEFLDAGQYTCHKGGETLSHSHLLLHKKENGIWSTEILKNFKNKTFLKCEAPNYSGRFTCSWLVQRNMDLKFNIKSSSSSPDSRAVTCGTASLSAEKVTLDQRDYEKYSVSCQEDVTCPTAEETLPIELALEARQQNKYENYSTSFFIRDIIKPDPPKNLQMKPLKNSQVEVSWEYPDSWSTPHSYFSLKFFVRIQRKKEKMKETEEGCNQKGALLVEKTSTEVQCKGGNVCVQAQDRYYNSSCSKWACVPCRVRS

SEQ ID NO: 184 - DNA, 1656 bp, Mus musculus
  source 1..1656: mol_type = genomic DNA
atgctggattgcagagcagtaataatgctatggctgttgccctgggtcactcagggcctggctgtgcctaggagtagcagtcctgactgggctcagtgccagcagctctctcggaatctctgcatgctagcctggaacgcacatgcaccagcgggacatatgaatctactaagagaagaagaggatgaagagactaaaaataatgtgccccgtatccagtgtgaagatggttgtgacccacaaggactcaaggacaacagccagttctgcttgcaaaggatccgccaaggtctggctttttataagcacctgcttgactctgacatcttcaaaggggagcctgctctactccctgatagccccatggagcaacttcacacctccctactaggactcagccaactcctccagccagaggatcacccccgggagacccaacagatgcccagcctgagttctagtcagcagtggcagcgcccccttctccgttccaagatccttcgaagcctccaggcctttttggccatagctgcccgggtctttgcccacggagcagcaactctgactgagcccttagtgccaacagctgccaccaacttttcattgctcaagcaggcgggcgatgtggaggaaaaccctggccccggatcctgtcctcagaagctaaccatctcctggtttgccatcgttttgctggtgtctccactcatggccatgtgggagctggagaaagacgtttatgttgtagaggtggactggactcccgatgcccctggagaaacagtgaacctcacctgtgacacgcctgaagaagatgacatcacctggacctcagaccagagacatggagtcataggctctggaaagaccctgaccatcactgtcaaagagtttctagatgctggccagtacacctgccacaaaggaggcgagactctgagccactcacatctgctgctccacaagaaggaaaatggaatttggtccactgaaattttaaaaaatttcaaaaacaagactttcctgaagtgtgaagcaccaaattactccggacggttcacgtgctcatggctggtgcaaagaaacatggacttgaagttcaacatcaagagcagtagcagttcccctgactctcgggcagtgacatgtggaacggcgtctctgtctgcagagaaggtcacactggaccaaagggactatgagaagtattcagtgtcctgccaggaggatgtcacctgcccaactgccgaggagaccctgcccattgaactggcgttggaagcacggcagcagaataaatatgagaactacagcaccagcttcttcatcagggacatcatcaaaccagacccgcccaagaacttgcagatgaagcctttgaagaactcacaggtggaggtcagctgggagtaccctgactcctggagcactccccattcctacttctccctcaagttctttgttcgaatccagcgcaagaaagaaaagatgaaggagacagaggaggggtgtaaccagaaaggtgcgctcctcgtagagaagacatctaccgaagtccaatgcaaaggcgggaatgtctgcgtgcaagctcaggatcgctattacaattcctcgtgcagcaagtgggcatgtgttccctgcagggtccgatcctag

SEQ ID NO: 185 - protein, 196 aa, Mus musculus
MLDCRAVIMLWLLPWVTQGLAVPRSSSPDWAQCQQLSRNLCMLAWNAHAPAGHMNLLREEEDEETKNNVPRIQCEDGCDPQGLKDNSQFCLQRIRQGLAFYKHLLDSDIFKGEPALLPDSPMEQLHTSLLGLSQLLQPEDHPRETQQMPSLSSSQQWQRPLLRSKILRSLQAFLAIAARVFAHGAATLTEPLVPTA

SEQ ID NO: 186 - DNA, 573 bp, Mus musculus
  source 1..573: mol_type = genomic DNA
gccaccatgctggggagcagagctgtaatgctgctgttgctgctgccctggacagctcagggcagagctgtgcctgggggcagcagccctgcctggactcagtgccagcagctttcacagaagctctgcacactggcctggagtgcacatccactagtgggacacatggatctaagagaagagggagatgaagagactacaaatgatgttccccatatccagtgtggagatggctgtgacccccaaggactcagggacaacagtcagttctgcttgcaaaggatccaccagggtctgattttttatgagaagctgctaggatcggatattttcacaggggagccttctctgctccctgatagccctgtgggccagcttcatgcctccctactgggcctcagccaactcctgcagcctgagggtcaccactgggagactcagcagattccaagcctcagtcccagccagccatggcagcgtctccttctccgcttcaaaatccttcgcagcctccaggcctttgtggctgtagccgcccgggtctttgcccatggagcagcaaccctgagtccc

SEQ ID NO: 187 - protein, 334 aa, Mus musculus
CPQKLTISWFAIVLLVSPLMAMWELEKDVYVVEVDWTPDAPGETVNLTCDTPEEDDITWTSDQRHGVIGSGKTLTITVKEFLDAGQYTCHKGGETLSHSHLLLHKKENGIWSTEILKNFKNKTFLKCEAPNYSGRFTCSWLVQRNMDLKFNIKSSSSSPDSRAVTCGTASLSAEKVTLDQRDYEKYSVSCQEDVTCPTAEETLPIELALEARQQNKYENYSTSFFIRDIIKPDPPKNLQMKPLKNSQVEVSWEYPDSWSTPHSYFSLKFFVRIQRKKEKMKETEEGCNQKGALLVEKTSTEVQCKGGNVCVQAQDRYYNSSCSKWACVPCRVRS

SEQ ID NO: 188 - DNA, 993 bp, Mus musculus
  source 1..993: mol_type = genomic DNA
ggatccatgtgtcaccagcagttggtcatctcttggttttccctggtttttctggcatctcccctcgtggccatatgggaactgaagaaagatgtttatgtcgtagaattggattggtatccggatgcccctggagaaatggtggtcctcacctgtgacacccctgaagaagatggtatcacctggaccttggaccagagcagtgaggtcttaggctctggcaaaaccctgaccatccaagtcaaagagtttggagatgctggccagtacacctgtcacaaaggaggcgaggttctaagccattcgctcctgctgcttcacaaaaaggaagatggaatttggtccactgatattttaaaggaccagaaagaacccaaaaataagacctttctaagatgcgaggccaagaattattctggacgtttcacctgctggtggctgacgacaatcagtactgatttgacattcagtgtcaaaagcagcagaggctcttctgacccccaaggggtgacgtgcggagctgctacactctctgcagagagagtcagaggggacaacaaggagtatgagtactcagtggagtgccaggaggacagtgcctgcccagctgctgaggagagtctgcccattgaggtcatggtggatgccgttcacaagctcaagtatgaaaactacaccagcagcttcttcatcagggacatcatcaaacctgacccacccaagaacttgcagctgaagccattaaagaattctcggcaggtggaggtcagctgggagtaccctgacacctggagtactccacattcctacttctccctgacattctgcgttcaggtccagggcaagagcaagagagaaaagaaagatagagtcttcacggacaagacctcagccacggtcatctgccgcaaaaatgccagcattagcgtgcgggcccaggaccgctactatagctcatcttggagcgaatgggcatctgtgccctgcagttag

SEQ ID NO: 189 - protein, 536 aa, Homo sapiens
MLGSRAVMLLLLLPWTAQGRAVPGGSSPAWTQCQQLSQKLCTLAWSAHPLVGHMDLREEGDEETTNDVPHIQCGDGCDPQGLRDNSQFCLQRIHQGLIFYEKLLGSDIFTGEPSLLPDSPVGQLHASLLGLSQLLQPEGHHWETQQIPSLSPSQPWQRLLLRFKILRSLQAFVAVAARVFAHGAATLSPATNFSLLKQAGDVEENPGPMCHQQLVISWFSLVFLASPLVAIWELKKDVYVVELDWYPDAPGEMVVLTCDTPEEDGITWTLDQSSEVLGSGKTLTIQVKEFGDAGQYTCHKGGEVLSHSLLLLHKKEDGIWSTDILKDQKEPKNKTFLRCEAKNYSGRFTCWWLTTISTDLTFSVKSSRGSSDPQGVTCGAATLSAERVRGDNKEYEYSVECQEDSACPAAEESLPIEVMVDAVHKLKYENYTSSFFIRDIIKPDPPKNLQLKPLKNSRQVEVSWEYPDTWSTPHSYFSLTFCVQVQGKSKREKKDRVFTDKTSATVICRKNASISVRAQDRYYSSSWSEWASVPCS

SEQ ID NO: 190 - DNA, 1623 bp, Homo sapiens
  source 1..1623: mol_type = genomic DNA
gccaccatgctggggagcagagctgtaatgctgctgttgctgctgccctggacagctcagggcagagctgtgcctgggggcagcagccctgcctggactcagtgccagcagctttcacagaagctctgcacactggcctggagtgcacatccactagtgggacacatggatctaagagaagagggagatgaagagactacaaatgatgttccccatatccagtgtggagatggctgtgacccccaaggactcagggacaacagtcagttctgcttgcaaaggatccaccagggtctgattttttatgagaagctgctaggatcggatattttcacaggggagccttctctgctccctgatagccctgtgggccagcttcatgcctccctactgggcctcagccaactcctgcagcctgagggtcaccactgggagactcagcagattccaagcctcagtcccagccagccatggcagcgtctccttctccgcttcaaaatccttcgcagcctccaggcctttgtggctgtagccgcccgggtctttgcccatggagcagcaaccctgagtcccgccaccaacttttcattgctcaagcaggcgggcgatgtggaggaaaaccctggccccggatccatgtgtcaccagcagttggtcatctcttggttttccctggtttttctggcatctcccctcgtggccatatgggaactgaagaaagatgtttatgtcgtagaattggattggtatccggatgcccctggagaaatggtggtcctcacctgtgacacccctgaagaagatggtatcacctggaccttggaccagagcagtgaggtcttaggctctggcaaaaccctgaccatccaagtcaaagagtttggagatgctggccagtacacctgtcacaaaggaggcgaggttctaagccattcgctcctgctgcttcacaaaaaggaagatggaatttggtccactgatattttaaaggaccagaaagaacccaaaaataagacctttctaagatgcgaggccaagaattattctggacgtttcacctgctggtggctgacgacaatcagtactgatttgacattcagtgtcaaaagcagcagaggctcttctgacccccaaggggtgacgtgcggagctgctacactctctgcagagagagtcagaggggacaacaaggagtatgagtactcagtggagtgccaggaggacagtgcctgcccagctgctgaggagagtctgcccattgaggtcatggtggatgccgttcacaagctcaagtatgaaaactacaccagcagcttcttcatcagggacatcatcaaacctgacccacccaagaacttgcagctgaagccattaaagaattctcggcaggtggaggtcagctgggagtaccctgacacctggagtactccacattcctacttctccctgacattctgcgttcaggtccagggcaagagcaagagagaaaagaaagatagagtcttcacggacaagacctcagccacggtcatctgccgcaaaaatgccagcattagcgtgcgggcccaggaccgctactatagctcatcttggagcgaatgggcatctgtgccctgcagttag

SEQ ID NO: 191 - protein, 189 aa, Homo sapiens
MLGSRAVMLLLLLPWTAQGRAVPGGSSPAWTQCQQLSQKLCTLAWSAHPLVGHMDLREEGDEETTNDVPHIQCGDGCDPQGLRDNSQFCLQRIHQGLIFYEKLLGSDIFTGEPSLLPDSPVGQLHASLLGLSQLLQPEGHHWETQQIPSLSPSQPWQRLLLRFKILRSLQAFVAVAARVFAHGAATLSP

SEQ ID NO: 192 - DNA, 573 bp, Homo sapiens; identical to SEQ ID NO: 186
  source 1..573: mol_type = genomic DNA

SEQ ID NO: 193 - protein, 328 aa, Homo sapiens; identical to SEQ ID NO: 149

SEQ ID NO: 194 - DNA, 993 bp, Homo sapiens; identical to SEQ ID NO: 188
  source 1..993: mol_type = genomic DNA

SEQ ID NO: 195 - protein, 960 aa, synthetic construct
  REGION 1..960: note = HER2-LAMP Protein Sequence
MAPRSARRPLLLLLLLLLLGLMHCASAAMFMVKNGNGTACIMANFSAAFSVNYDTKSGPKNMTLDLPSDATVVLNRSSCGKENTSDPSLVIAFGRGHTLTLNFTRNATRYSVQLMSFVYNLSDTHLFPNASSKEIKTVESITDIRADIDKKYRCVSGTQVHMNNVTVTLHDATIQAYLSNSSFSRGETRCEQDLETQVCTGTDMKLRLPASPETHLDMLRHLYQGCQVVQGNLELTYLPTNASLSFLQDIQEVQGYVLIAHNQVRQVPLQRLRIVRGTQLFEDNYALAVLDNGDPLNNTTPVTGASPGGLRELQLRSLTEILKGGVLIQRNPQLCYQDTILWKDIFHKNNQLALTLIDTNRSRACHPCSPMCKGSRCWGESSEDCQSLTRTVCAGGCARCKGPLPTDCCHEQCAAGCTGPKHSDCLACLHFNHSGICELHCPALVTYNTDTFESMPNPEGRYTFGASCVTACPYNYLSTDVGSCTLVCPLHNQEVTAEDGTQRCEKCSKPCARVCYGLGMEHLREVRAVTSANIQEFAGCKKIFGSLAFLPESFDGDPASNTAPLQPEQLQVFETLEEITGYLYISAWPDSLPDLSVFQNLQVIRGRILHNGAYSLTLQGLGISWLGLRSLRELGSGLALIHHNTHLCFVHTVPWDQLFRNPHQALLHTANRPEDECVGEGLACHQLCARGHCWGPGPTQCVNCSQFLRGQECVEECRVLQGLPREYVNARHCLPCHPECQPQNGSVTCFGPEADQCVACAHYKDPPFCVARCPSGVKPDLSYMPIWKFPDEEGACQPCPINCTHEFTCLLASMGLQLNLTYERKDNTTVTRLLNINPNKTSASGSCGAHLVTLELHSEGTTVLLFQFGMNASSSRFFLQGIQLNTILPDARDPAFKAANGSLRALQATVGNSYKCNAEEHVRVTKAFSVNIFKVWVQAFKVEGGQFGSVEECLLDENSM

SEQ ID NO: 196 - protein, 470 aa, synthetic construct
  REGION 1..470: note = mSPD + sCD40L protein sequence
MLPFLSMLVLLVQPLGNLGAEMKSLSQRSVPNTCTLVMCSPTENGLPGRDGRDGREGPRGEKGDPGLPGPMGLSGLQGPTGPVGPKGENGSAGEPGPKGERGLSGPPGLPGIPGPAGKEGPSGKQGNIGPQGKPGPKGEAGPKGEVGAPGMQGSTGAKGSTGPKGERGAPGVQGAPGNAGAAGPAGPAGPQGAPGSRGPPGLKGDRGVPGDRGIKGESGLPDSAALRQQMEALKGKLQRLEVAFSHYQKAALFPDGHRRLDKVEEEVNLHEDFVFIKKLKRCNKGEGSLSLLNCEEMRRQFEDLVKDITLNKEEKKENSFEMQRGDEDPQIAAHVVSEANSNAASVLQWAKKGYYTMKSNLVMLENGKQLTVKREGLYYVYTQVTFCSNREPSSQRPFIVGLWLKPSSGSERILLKAANTHSSSQLCEQQSVHLGGVFELQAGASVFVNVTEASQVIHRVGFSSFGLLKL

SEQ ID NO: 197 - DNA, 5029 bp, synthetic construct
  misc_feature 1..5029: note = HER2-LAMP-sCD40L; HER2 (Extracellular Domain) +LAMP +EF-1alpha +SPD +sCD40L; DNA Sequence
  source 1..5029: mol_type = other DNA
atggtgaaaaatggcaacgggaccgcgtgcataatggccaacttctctgctgccttctcagtgaactacgacaccaagagtggccctaagaacatgacccttgacctgccatcagatgccacagtggtgctcaaccgcagctcctgtggaaaagagaacacttctgaccccagtctcgtgattgcttttggaagaggacatacactcactctcaatttcacgagaaatgcaacacgttacagcgtccagctcatgagttttgtttataacttgtcagacacacaccttttccccaatgcgagctccaaagaaatcaagactgtggaatctataactgacatcagggcagatatagataaaaaatacagatgtgttagtggcacccaggtccacatgaacaacgtgaccgtaacgctccatgatgccaccatccaggcgtacctttccaacagcagcttcagccggggagagacacgctgtgaacaagacctcgagacacaagtctgcaccggcaccgacatgaagctgagactgcccgccagccccgaaacccatctggacatgctgcggcatctgtaccaaggctgtcaagtggtgcaaggcaatctggaactgacatatctgcctaccaacgcctctctgagctttctgcaagacatccaagaagtgcaaggctacgtcctcattgcccacaaccaagtccgacaagtgccactgcagcggctgagaatcgtgcggggcacccagctgttcgaggacaactatgctctggccgtgctggacaacggcgaccctctgaacaacaccacaccagtgactggcgcctctcccggcggactgagagaactgcagctgcgctctctgaccgagattctgaagggcggcgtgctgatccagcggaaccctcagctgtgctaccaagacaccattctgtggaaggacatcttccacaagaacaaccagctggctctgaccctcatcgacaccaacagaagccgggcttgccacccttgcagccccatgtgcaagggcagcagatgttggggcgagagcagcgaggactgccagtctctgaccagaaccgtgtgtgccggcggatgcgccagatgcaagggccctctgccaaccgattgctgccacgaacagtgcgccgctggctgtaccggccccaagcacagcgattgtctggcttgtctgcacttcaaccactccggcatctgcgagctgcactgcccagccctcgtgacatacaacaccgacacattcgagagcatgcccaaccccgagggcagatacacattcggcgccagctgtgtgaccgcttgcccctacaactatctgagcaccgacgtgggcagctgcaccctcgtgtgccctctgcacaatcaagaagtgaccgccgaggacggcacccagagatgcgagaagtgctccaagccttgcgccagagtgtgctacggactgggcatggaacatctgcgggaagtgcgggccgtgaccagcgccaatatccaagaatttgccggctgcaagaagattttcggcagtctggcctttctgcccgagagcttcgatggcgaccccgcctctaacacagcccctctgcagccagagcagctccaagtgttcgagacactggaagagatcaccggctatctgtacatcagcgcttggcccgactctctgcccgatctgagcgtgttccagaatctgcaagtcatcagaggccggattctgcacaacggcgcctattctctgacactgcaaggactgggaatcagctggctgggactgcggagtctgagagagctgggcagcggactggcactgatccaccacaacacccatctgtgcttcgtgcacaccgtgccttgggatcagctgttccggaatccccaccaagctctgctgcacaccgccaacagacccgaggatgagtgtgtgggcgaggggctggcttgccatcagctctgtgccagaggacactgttggggacccggccctacccagtgcgtgaactgctcccagtttctgcggggccaagaatgcgtggaagagtgcagagtgctccaaggactgccccgcgagtacgtgaacgccagacactgtctgccatgccaccccgagtgccagcctcagaatggcagcgtgacatgcttcggccccgaggccgatcagtgtgtggcttgcgctcactacaaggaccctcccttctgcgtggcccggtgtccttctggcgtgaaacccgatctgtcctacatgcctatctggaagttccccgacgaggaaggcgcttgtcagccttgccccatcaactgcacccacgaattcacctgcctgctggccagcatggggctgcagctgaacctcacctatgagaggaaggacaacacgacggtgacaaggcttctcaacatcaaccccaacaagacctcggccagcgggagctgcggcgcccacctggtgactctggagctgcacagcgagggcaccaccgtcctgctcttccagttcgggatgaatgcaagttctagccggtttttcctacaaggaatccagttgaatacaattcttcctgacgccagagaccctgcctttaaagctgccaacggctccctgcgagcgctgcaggccacagtcggcaattcctacaagtgcaacgcggaggagcacgtccgtgtcacgaaggcgttttcagtcaatatattcaaagtgtgggtccaggctttcaaggtggaaggtggccagtttggctctgtggaggagtgtctgctggacgagaacagcatgctgatccccatcgctgtgggtggtgccctggcggggctggtcctcatcgtcctcatcgcctacctcgtcggcaggaagaggagtcacgcaggctaccagactatctagtaaagatctttttccctctgccaaaaattatggggacatcatgaagccccttgagcatctgacttctggctaataaaggaaatttattttcattgcaatagtgtgttggaattttttgtgtctctcactcggaaggacataagggcggccgcggtacccgtgaggctccggtgcccgtcagtgggcagagcgcacatcgcccacagtccccgagaagttggggggaggggtcggcaattgaaccggtgcctagagaaggtggcgcggggtaaactgggaaagtgatgtcgtgtactggctccgcctttttcccgagggtgggggagaaccgtatataagtgcagtagtcgccgtgaacgttctttttcgcaacgggtttgccgccagaacacagtctagaggatccgccgccaccatggaaaccgatacactgctgctgtgggtgctgttgctctgggttccaggatctacaggcgacatgctgccctttctctccatgcttgtcttgcttgtacagcccctgggaaatctgggagcagaaatgaagagcctctcgcagagatcagtacccaacacctgcaccctagtcatgtgtagcccaacagagaatggcctgcctggtcgtgatggacgggatgggagagaaggtccacggggtgagaagggtgatccaggtttgccaggacctatggggctctcagggttgcagggccctacaggtccagttggacccaaaggagagaatggctctgctggcgaacctggaccaaagggagaacgtggactaagtggacctccaggacttccaggtattcctggtccagctgggaaagaaggtccctctgggaagcaggggaacataggacctcaaggcaaaccaggtcctaaaggagaggctgggcccaaaggagaagtaggtgctcctggcatgcaaggatctacaggggcaaaaggctccacaggccccaagggagaaagaggtgcccctggtgtgcaaggagccccagggaatgctggagcagcaggacctgccggacctgccggtccacagggagctccaggttccagggggcccccaggactcaagggggacagaggtgttcctggagacagaggaatcaaaggtgaaagcgggcttccagacagtgctgctctgaggcagcagatggaggccttaaaaggaaaactacagcgtctagaggttgccttctcccactatcagaaagctgcattgttccctgatggccatagaagattggataaggtcgaagaggaagtaaaccttcatgaagattttgtattcataaaaaagctaaagagatgcaacaaaggagaaggatctttatccttgctgaactgtgaggagatgagaaggcaatttgaagaccttgtcaaggatataacgttaaacaaagaagagaaaaaagaaaacagctttgaaatgcaaagaggtgatgaggatcctcaaattgcagcacacgttgtaagcgaagccaacagtaatgcagcatccgttctacagtgggccaagaaaggatattataccatgaaaagcaacttggtaatgcttgaaaatgggaaacagctgacggttaaaagagaaggactctattatgtctacactcaagtcaccttctgctctaatcgggagccttcgagtcaacgcccattcatcgtcggcctctggctgaagcccagcagtggatctgagagaatcttactcaaggcggcaaatacccacagttcctcccagctttgcgagcagcagtctgttcacttgggcggagtgtttgaattacaagctggtgcttctgtgtttgtcaacgtgactgaagcaagccaagtgatccacagagttggcttctcatcttttggcttactcaaactctgaacgcgtttcctgtgccttctagttgccagccatctgttgtttgcccctcccccgtgccttccttgaccctggaaggtgccactcccactgtcctttcctaataaaatgaggaaattgcatcgcattgtctgagtaggtgtcattctattctggggggtggggtggggcaggacagcaagggggaggattgggaagacaatagcaggcatgctggggatgcggtgggctctatggcccggg

SEQ ID NO: 198 - protein, 195 aa, synthetic construct
  REGION 1..195: note = LAMP Signal Sequence and Luminal Domain 1
MAPRSARRPLLLLLLLLLLGLMHCASAAMFMVKNGNGTACIMANFSAAFSVNYDTKSGPKNMTLDLPSDATVVLNRSSCGKENTSDPSLVIAFGRGHTLTLNFTRNATRYSVQLMSFVYNLSDTHLFPNASSKEIKTVESITDIRADIDKKYRCVSGTQVHMNNVTVTLHDATIQAYLSNSSFSRGETRCEQDLE

SEQ ID NO: 199 - DNA, 585 bp, synthetic construct
  misc_feature 1..585: note = LAMP Signal Sequence and Luminal Domain 1
  source 1..585: mol_type = other DNA
atggcgccccgcagcgcccggcgacccctgctgctgctactgctgttgctgctgctcggcctcatgcattgtgcgtcagcagcaatgtttatggtgaaaaatggcaacgggaccgcgtgcataatggccaacttctctgctgccttctcagtgaactacgacaccaagagtggccctaagaacatgacccttgacctgccatcagatgccacagtggtgctcaaccgcagctcctgtggaaaagagaacacttctgaccccagtctcgtgattgcttttggaagaggacatacactcactctcaatttcacgagaaatgcaacacgttacagcgtccagctcatgagttttgtttataacttgtcagacacacaccttttccccaatgcgagctccaaagaaatcaagactgtggaatctataactgacatcagggcagatatagataaaaaatacagatgtgttagtggcacccaggtccacatgaacaacgtgaccgtaacgctccatgatgccaccatccaggcgtacctttccaacagcagcttcagccggggagagacacgctgtgaacaagacctcgag

SEQ ID NO: 200 - protein, 612 aa, synthetic construct
  REGION 1..612: note = HER2 (Extracellular Domain) Protein Sequence
TQVCTGTDMKLRLPASPETHLDMLRHLYQGCQVVQGNLELTYLPTNASLSFLQDIQEVQGYVLIAHNQVRQVPLQRLRIVRGTQLFEDNYALAVLDNGDPLNNTTPVTGASPGGLRELQLRSLTEILKGGVLIQRNPQLCYQDTILWKDIFHKNNQLALTLIDTNRSRACHPCSPMCKGSRCWGESSEDCQSLTRTVCAGGCARCKGPLPTDCCHEQCAAGCTGPKHSDCLACLHFNHSGICELHCPALVTYNTDTFESMPNPEGRYTFGASCVTACPYNYLSTDVGSCTLVCPLHNQEVTAEDGTQRCEKCSKPCARVCYGLGMEHLREVRAVTSANIQEFAGCKKIFGSLAFLPESFDGDPASNTAPLQPEQLQVFETLEEITGYLYISAWPDSLPDLSVFQNLQVIRGRILHNGAYSLTLQGLGISWLGLRSLRELGSGLALIHHNTHLCFVHTVPWDQLFRNPHQALLHTANRPEDECVGEGLACHQLCARGHCWGPGPTQCVNCSQFLRGQECVEECRVLQGLPREYVNARHCLPCHPECQPQNGSVTCFGPEADQCVACAHYKDPPFCVARCPSGVKPDLSYMPIWKFPDEEGACQPCPINCTHEF

SEQ ID NO: 201 - DNA, 1836 bp, synthetic construct
  misc_feature 1..1836: note = HER2 (Extracellular Domain) DNA Sequence
  source 1..1836: mol_type = other DNA
acccaggtgtgcaccggcaccgatatgaaactgcgcctgccggcgagcccggaaacccatctggatatgctgcgccatctgtatcagggctgccaggtggtgcagggcaacctggaactgacctatctgccgaccaacgcgagcctgagctttctgcaggatattcaggaagtgcagggctatgtgctgattgcgcataaccaggtgcgccaggtgccgctgcagcgcctgcgcattgtgcgcggcacccagctgtttgaagataactatgcgctggcggtgctggataacggcgatccgctgaacaacaccaccccggtgaccggcgcgagcccgggcggcctgcgcgaactgcagctgcgcagcctgaccgaaattctgaaaggcggcgtgctgattcagcgcaacccgcagctgtgctatcaggataccattctgtggaaagatatttttcataaaaacaaccagctggcgctgaccctgattgataccaaccgcagccgcgcgtgccatccgtgcagcccgatgtgcaaaggcagccgctgctggggcgaaagcagcgaagattgccagagcctgacccgcaccgtgtgcgcgggcggctgcgcgcgctgcaaaggcccgctgccgaccgattgctgccatgaacagtgcgcggcgggctgcaccggcccgaaacatagcgattgcctggcgtgcctgcattttaaccatagcggcatttgcgaactgcattgcccggcgctggtgacctataacaccgatacctttgaaagcatgccgaacccggaaggccgctatacctttggcgcgagctgcgtgaccgcgtgcccgtataactatctgagcaccgatgtgggcagctgcaccctggtgtgcccgctgcataaccaggaagtgaccgcggaagatggcacccagcgctgcgaaaaatgcagcaaaccgtgcgcgcgcgtgtgctatggcctgggcatggaacatctgcgcgaagtgcgcgcggtgaccagcgcgaacattcaggaatttgcgggctgcaaaaaaatttttggcagcctggcgtttctgccggaaagctttgatggcgatccggcgagcaacaccgcgccgctgcagccggaacagctgcaggtgtttgaaaccctggaagaaattaccggctatctgtatattagcgcgtggccggatagcctgccggatctgagcgtgtttcagaacctgcaggtgattcgcggccgcattctgcataacggcgcgtatagcctgaccctgcagggcctgggcattagctggctgggcctgcgcagcctgcgcgaactgggcagcggcctggcgctgattcatcataacacccatctgtgctttgtgcataccgtgccgtgggatcagctgtttcgcaacccgcatcaggcgctgctgcataccgcgaaccgcccggaagatgaatgcgtgggcgaaggcctggcgtgccatcagctgtgcgcgcgcggccattgctggggcccgggcccgacccagtgcgtgaactgcagccagtttctgcgcggccaggaatgcgtggaagaatgccgcgtgctgcagggcctgccgcgcgaatatgtgaacgcgcgccattgcctgccgtgccatccggaatgccagccgcagaacggcagcgtgacctgctttggcccggaagcggatcagtgcgtggcgtgcgcgcattataaagatccgccgttttgcgtggcgcgctgcccgagcggcgtgaaaccggatctgagctatatgccgatttggaaatttccggatgaagaaggcgcgtgccagccgtgcccgattaactgcacccatgaattt

SEQ ID NO: 202 - protein, 153 aa, synthetic construct
  REGION 1..153: note = Luminal Domain 2 of LAMP Protein Sequence
TCLLASMGLQLNLTYERKDNTTVTRLLNINPNKTSASGSCGAHLVTLELHSEGTTVLLFQFGMNASSSRFFLQGIQLNTILPDARDPAFKAANGSLRALQATVGNSYKCNAEEHVRVTKAFSVNIFKVWVQAFKVEGGQFGSVEECLLDENSM

SEQ ID NO: 203 - DNA, 459 bp, synthetic construct
  misc_feature 1..459: note = Luminal Domain 2 of LAMP DNA Sequence
  source 1..459: mol_type = other DNA
acctgcctgctggccagcatggggctgcagctgaacctcacctatgagaggaaggacaacacgacggtgacaaggcttctcaacatcaaccccaacaagacctcggccagcgggagctgcggcgcccacctggtgactctggagctgcacagcgagggcaccaccgtcctgctcttccagttcgggatgaatgcaagttctagccggtttttcctacaaggaatccagttgaatacaattcttcctgacgccagagaccctgcctttaaagctgccaacggctccctgcgagcgctgcaggccacagtcggcaattcctacaagtgcaacgcggaggagcacgtccgtgtcacgaaggcgttttcagtcaatatattcaaagtgtgggtccaggctttcaaggtggaaggtggccagtttggctctgtggaggagtgtctgctggacgagaacagcatg

SEQ ID NO: 204 - protein, 214 aa, synthetic construct
  REGION 1..214: note = sCD40L Protein Sequence
HRRLDKVEEEVNLHEDFVFIKKLKRCNKGEGSLSLLNCEEMRRQFEDLVKDITLNKEEKKENSFEMQRGDEDPQIAAHVVSEANSNAASVLQWAKKGYYTMKSNLVMLENGKQLTVKREGLYYVYTQVTFCSNREPSSQRPFIVGLWLKPSSGSERILLKAANTHSSSQLCEQQSVHLGGVFELQAGASVFVNVTEASQVIHRVGFSSFGLLKL

SEQ ID NO: 205 - DNA, 645 bp, synthetic construct
  misc_feature 1..645: note = sCD40L DNA Sequence
  source 1..645: mol_type = other DNA
catcgccgcctggataaagtggaagaagaagtgaacctgcatgaagattttgtgtttattaaaaaactgaaacgctgcaacaaaggcgaaggcagcctgagcctgctgaactgcgaagaaatgcgccgccagtttgaagatctggtgaaagatattaccctgaacaaagaagaaaaaaaagaaaacagctttgaaatgcagcgcggcgatgaagatccgcagattgcggcgcatgtggtgagcgaagcgaacagcaacgcggcgagcgtgctgcagtgggcgaaaaaaggctattataccatgaaaagcaacctggtgatgctggaaaacggcaaacagctgaccgtgaaacgcgaaggcctgtattatgtgtatacccaggtgaccttttgcagcaaccgcgaaccgagcagccagcgcccgtttattgtgggcctgtggctgaaaccgagcagcggcagcgaacgcattctgctgaaagcggcgaacacccatagcagcagccagctgtgcgaacagcagagcgtgcatctgggcggcgtgtttgaactgcaggcgggcgcgagcgtgtttgtgaacgtgaccgaagcgagccaggtgattcatcgcgtgggctttagcagctttggcctgctgaaactgtaa

SEQ ID NO: 206 - skipped

SEQ ID NO: 207 - protein, 423 aa, synthetic construct
  REGION 1..423: note = SPD + mFLT3L protein sequence
MLPFLSMLVLLVQPLGNLGAEMKSLSQRSVPNTCTLVMCSPTENGLPGRDGRDGREGPRGEKGDPGLPGPMGLSGLQGPTGPVGPKGENGSAGEPGPKGERGLSGPPGLPGIPGPAGKEGPSGKQGNIGPQGKPGPKGEAGPKGEVGAPGMQGSTGAKGSTGPKGERGAPGVQGAPGNAGAAGPAGPAGPQGAPGSRGPPGLKGDRGVPGDRGIKGESGLPDSAALRQQMEALKGKLQRLEVAFSHYQKAALFPDGPCLRGTPDCYFSHSPISSNFKVKFRELTDHLLKDYPVTVAVNLQDEKHCKALWSLFLAQRWIEQLKTVAGSKMQTLLEDVNTEIHFVTSCTFQPLPECLRFVQTNISHLLKDTCTQLLALKPCIGKACQNFSRCLEVQCQPDSSTLLPPRSPIALEATELPEPRPRQ

SEQ ID NO: 208 - DNA, 4735 bp, synthetic construct
  misc_feature 1..4735: note = HER2-LAMP-mFLT3L; HER2 (Extracellular Domain) +LAMP +EF-1alpha +SPD +mFLT3L; DNA Sequence
  source 1..4735: mol_type = other DNA
atggcgccccgcagcgcccggcgacccctgctgctgctactgctgttgctgctgctcggcctcatgcattgtgcgtcagcagcaatgtttatggtgaaaaatggcaacgggaccgcgtgcataatggccaacttctctgctgccttctcagtgaactacgacaccaagagtggccctaagaacatgacccttgacctgccatcagatgccacagtggtgctcaaccgcagctcctgtggaaaagagaacacttctgaccccagtctcgtgattgcttttggaagaggacatacactcactctcaatttcacgagaaatgcaacacgttacagcgtccagctcatgagttttgtttataacttgtcagacacacaccttttccccaatgcgagctccaaagaaatcaagactgtggaatctataactgacatcagggcagatatagataaaaaatacagatgtgttagtggcacccaggtccacatgaacaacgtgaccgtaacgctccatgatgccaccatccaggcgtacctttccaacagcagcttcagccggggagagacacgctgtgaacaagacctcgagacacaagtctgcaccggcaccgacatgaagctgagactgcccgccagccccgaaacccatctggacatgctgcggcatctgtaccaaggctgtcaagtggtgcaaggcaatctggaactgacatatctgcctaccaacgcctctctgagctttctgcaagacatccaagaagtgcaaggctacgtcctcattgcccacaaccaagtccgacaagtgccactgcagcggctgagaatcgtgcggggcacccagctgttcgaggacaactatgctctggccgtgctggacaacggcgaccctctgaacaacaccacaccagtgactggcgcctctcccggcggactgagagaactgcagctgcgctctctgaccgagattctgaagggcggcgtgctgatccagcggaaccctcagctgtgctaccaagacaccattctgtggaaggacatcttccacaagaacaaccagctggctctgaccctcatcgacaccaacagaagccgggcttgccacccttgcagccccatgtgcaagggcagcagatgttggggcgagagcagcgaggactgccagtctctgaccagaaccgtgtgtgccggcggatgcgccagatgcaagggccctctgccaaccgattgctgccacgaacagtgcgccgctggctgtaccggccccaagcacagcgattgtctggcttgtctgcacttcaaccactccggcatctgcgagctgcactgcccagccctcgtgacatacaacaccgacacattcgagagcatgcccaaccccgagggcagatacacattcggcgccagctgtgtgaccgcttgcccctacaactatctgagcaccgacgtgggcagctgcaccctcgtgtgccctctgcacaatcaagaagtgaccgccgaggacggcacccagagatgcgagaagtgctccaagccttgcgccagagtgtgctacggactgggcatggaacatctgcgggaagtgcgggccgtgaccagcgccaatatccaagaatttgccggctgcaagaagattttcggcagtctggcctttctgcccgagagcttcgatggcgaccccgcctctaacacagcccctctgcagccagagcagctccaagtgttcgagacactggaagagatcaccggctatctgtacatcagcgcttggcccgactctctgcccgatctgagcgtgttccagaatctgcaagtcatcagaggccggattctgcacaacggcgcctattctctgacactgcaaggactgggaatcagctggctgggactgcggagtctgagagagctgggcagcggactggcactgatccaccacaacacccatctgtgcttcgtgcacaccgtgccttgggatcagctgttccggaatccccaccaagctctgctgcacaccgccaacagacccgaggatgagtgtgtgggcgaggggctggcttgccatcagctctgtgccagaggacactgttggggacccggccctacccagtgcgtgaactgctcccagtttctgcggggccaagaatgcgtggaagagtgcagagtgctccaaggactgccccgcgagtacgtgaacgccagacactgtctgccatgccaccccgagtgccagcctcagaatggcagcgtgacatgcttcggccccgaggccgatcagtgtgtggcttgcgctcactacaaggaccctcccttctgcgtggcccggtgtccttctggcgtgaaacccgatctgtcctacatgcctatctggaagttccccgacgaggaaggcgcttgtcagccttgccccatcaactgcacccacgaattcacctgcctgctggccagcatggggctgcagctgaacctcacctatgagaggaaggacaacacgacggtgacaaggcttctcaacatcaaccccaacaagacctcggccagcgggagctgcggcgcccacctggtgactctggagctgcacagcgagggcaccaccgtcctgctcttccagttcgggatgaatgcaagttctagccggtttttcctacaaggaatccagttgaatacaattcttcctgacgccagagaccctgcctttaaagctgccaacggctccctgcgagcgctgcaggccacagtcggcaattcctacaagtgcaacgcggaggagcacgtccgtgtcacgaaggcgttttcagtcaatatattcaaagtgtgggtccaggctttcaaggtggaaggtggccagtttggctctgtggaggagtgtctgctggacgagaacagcatgctgatccccatcgctgtgggtggtgccctggcggggctggtcctcatcgtcctcatcgcctacctcgtcggcaggaagaggagtcacgcaggctaccagactatctagtaaagatctttttccctctgccaaaaattatggggacatcatgaagccccttgagcatctgacttctggctaataaaggaaatttattttcattgcaatagtgtgttggaattttttgtgtctctcactcggaaggacataagggcggccgcggtacccgtgaggctccggtgcccgtcagtgggcagagcgcacatcgcccacagtccccgagaagttggggggaggggtcggcaattgaaccggtgcctagagaaggtggcgcggggtaaactgggaaagtgatgtcgtgtactggctccgcctttttcccgagggtgggggagaaccgtatataagtgcagtagtcgccgtgaacgttctttttcgcaacgggtttgccgccagaacacagtctagaggatccgccgccaccatggaaaccgatacactgctgctgtgggtgctgttgctctgggttccaggatctacaggcgacatgctgccctttctctccatgcttgtcttgcttgtacagcccctgggaaatctgggagcagaaatgaagagcctctcgcagagatcagtacccaacacctgcaccctagtcatgtgtagcccaacagagaatggcctgcctggtcgtgatggacgggatgggagagaaggtccacggggtgagaagggtgatccaggtttgccaggacctatggggctctcagggttgcagggccctacaggtccagttggacccaaaggagagaatggctctgctggcgaacctggaccaaagggagaacgtggactaagtggacctccaggacttccaggtattcctggtccagctgggaaagaaggtccctctgggaagcaggggaacataggacctcaaggcaaaccaggtcctaaaggagaggctgggcccaaaggagaagtaggtgctcctggcatgcaaggatctacaggggcaaaaggctccacaggccccaagggagaaagaggtgcccctggtgtgcaaggagccccagggaatgctggagcagcaggacctgccggacctgccggtccacagggagctccaggttccagggggcccccaggactcaagggggacagaggtgttcctggagacagaggaatcaaaggtgaaagcgggcttccagacagtgctgctctgaggcagcagatggaggccttaaaaggaaaactacagcgtctagaggttgccttctcccactatcagaaagctgcattgttccctgatggcccctgcctgagaggcacccctgattgctacttctctcacagccccatcagcagcaacttcaaagtgaagttcagagagctgaccgaccatctgctgaaggactaccctgtgaccgtggccgtgaacctgcaggatgagaagcactgcaaagccctgtggtccctgtttctggcccagagatggatcgagcagctgaaaacagtggccggcagcaagatgcagaccctgctggaagatgtgaacaccgagatccacttcgtgaccagctgcaccttccagcctctgcctgagtgcctgagattcgtgcagaccaacatcagccatctgctcaaagacacatgcacccagctgctggccctgaagccttgtatcggcaaagcctgccagaacttcagccggtgcctggaagttcagtgccagcctgatagcagcacactgctgcctccaagaagccctatcgctctggaagccacagagctgcctgagcctagacctcggcag

SEQ ID NO: 209 - protein, 167 aa, synthetic construct
  REGION 1..167: note = mFLT3L; Protein Sequence
PCLRGTPDCYFSHSPISSNFKVKFRELTDHLLKDYPVTVAVNLQDEKHCKALWSLFLAQRWIEQLKTVAGSKMQTLLEDVNTEIHFVTSCTFQPLPECLRFVQTNISHLLKDTCTQLLALKPCIGKACQNFSRCLEVQCQPDSSTLLPPRSPIALEATELPEPRPRQ

SEQ ID NO: 210 - DNA, 501 bp, synthetic construct
  misc_feature 1..501: note = mFLT3L; DNA Sequence
  source 1..501: mol_type = other DNA
ccgtgcctgcgcggcaccccggattgctattttagccatagcccgattagcagcaactttaaagtgaaatttcgcgaactgaccgatcatctgctgaaagattatccggtgaccgtggcggtgaacctgcaggatgaaaaacattgcaaagcgctgtggagcctgtttctggcgcagcgctggattgaacagctgaaaaccgtggcgggcagcaaaatgcagaccctgctggaagatgtgaacaccgaaattcattttgtgaccagctgcacctttcagccgctgccggaatgcctgcgctttgtgcagaccaacattagccatctgctgaaagatacctgcacccagctgctggcgctgaaaccgtgcattggcaaagcgtgccagaactttagccgctgcctggaagtgcagtgccagccggatagcagcaccctgctgccgccgcgcagcccgattgcgctggaagcgaccgaactgccggaaccgcgcccgcgccag

SEQ ID NO: 211 - skipped

SEQ ID NO: 212 - DNA, 3846 bp, synthetic construct
  misc_feature 1..3846: note = HER2-LAMP-IL-12; HER2 (Extracellular domain) +LAMP +EF-1alpha +IL-12; DNA Sequence
  source 1..3846: mol_type = other DNA
atggcgccccgcagcgcccggcgacccctgctgctgctactgctgttgctgctgctcggcctcatgcattgtgcgtcagcagcaatgtttatggtgaaaaatggcaacgggaccgcgtgcataatggccaacttctctgctgccttctcagtgaactacgacaccaagagtggccctaagaacatgacccttgacctgccatcagatgccacagtggtgctcaaccgcagctcctgtggaaaagagaacacttctgaccccagtctcgtgattgcttttggaagaggacatacactcactctcaatttcacgagaaatgcaacacgttacagcgtccagctcatgagttttgtttataacttgtcagacacacaccttttccccaatgcgagctccaaagaaatcaagactgtggaatctataactgacatcagggcagatatagataaaaaatacagatgtgttagtggcacccaggtccacatgaacaacgtgaccgtaacgctccatgatgccaccatccaggcgtacctttccaacagcagcttcagccggggagagacacgctgtgaacaagacctcgagacacaagtctgcaccggcaccgacatgaagctgagactgcccgccagccccgaaacccatctggacatgctgcggcatctgtaccaaggctgtcaagtggtgcaaggcaatctggaactgacatatctgcctaccaacgcctctctgagctttctgcaagacatccaagaagtgcaaggctacgtcctcattgcccacaaccaagtccgacaagtgccactgcagcggctgagaatcgtgcggggcacccagctgttcgaggacaactatgctctggccgtgctggacaacggcgaccctctgaacaacaccacaccagtgactggcgcctctcccggcggactgagagaactgcagctgcgctctctgaccgagattctgaagggcggcgtgctgatccagcggaaccctcagctgtgctaccaagacaccattctgtggaaggacatcttccacaagaacaaccagctggctctgaccctcatcgacaccaacagaagccgggcttgccacccttgcagccccatgtgcaagggcagcagatgttggggcgagagcagcgaggactgccagtctctgaccagaaccgtgtgtgccggcggatgcgccagatgcaagggccctctgccaaccgattgctgccacgaacagtgcgccgctggctgtaccggccccaagcacagcgattgtctggcttgtctgcacttcaaccactccggcatctgcgagctgcactgcccagccctcgtgacatacaacaccgacacattcgagagcatgcccaaccccgagggcagatacacattcggcgccagctgtgtgaccgcttgcccctacaactatctgagcaccgacgtgggcagctgcaccctcgtgtgccctctgcacaatcaagaagtgaccgccgaggacggcacccagagatgcgagaagtgctccaagccttgcgccagagtgtgctacggactgggcatggaacatctgcgggaagtgcgggccgtgaccagcgccaatatccaagaatttgccggctgcaagaagattttcggcagtctggcctttctgcccgagagcttcgatggcgaccccgcctctaacacagcccctctgcagccagagcagctccaagtgttcgagacactggaagagatcaccggctatctgtacatcagcgcttggcccgactctctgcccgatctgagcgtgttccagaatctgcaagtcatcagaggccggattctgcacaacggcgcctattctctgacactgcaaggactgggaatcagctggctgggactgcggagtctgagagagctgggcagcggactggcactgatccaccacaacacccatctgtgcttcgtgcacaccgtgccttgggatcagctgttccggaatccccaccaagctctgctgcacaccgccaacagacccgaggatgagtgtgtgggcgaggggctggcttgccatcagctctgtgccagaggacactgttggggacccggccctacccagtgcgtgaactgctcccagtttctgcggggccaagaatgcgtggaagagtgcagagtgctccaaggactgccccgcgagtacgtgaacgccagacactgtctgccatgccaccccgagtgccagcctcagaatggcagcgtgacatgcttcggccccgaggccgatcagtgtgtggcttgcgctcactacaaggaccctcccttctgcgtggcccggtgtccttctggcgtgaaacccgatctgtcctacatgcctatctggaagttccccgacgaggaaggcgcttgtcagccttgccccatcaactgcacccacgaattcacctgcctgctggccagcatggggctgcagctgaacctcacctatgagaggaaggacaacacgacggtgacaaggcttctcaacatcaaccccaacaagacctcggccagcgggagctgcggcgcccacctggtgactctggagctgcacagcgagggcaccaccgtcctgctcttccagttcgggatgaatgcaagttctagccggtttttcctacaaggaatccagttgaatacaattcttcctgacgccagagaccctgcctttaaagctgccaacggctccctgcgagcgctgcaggccacagtcggcaattcctacaagtgcaacgcggaggagcacgtccgtgtcacgaaggcgttttcagtcaatatattcaaagtgtgggtccaggctttcaaggtggaaggtggccagtttggctctgtggaggagtgtctgctggacgagaacagcatgctgatccccatcgctgtgggtggtgccctggcggggctggtcctcatcgtcctcatcgcctacctcgtcggcaggaagaggagtcacgcaggctaccagactatctagtaaagatctttttccctctgccaaaaattatggggacatcatgaagccccttgagcatctgacttctggctaataaaggaaatttattttcattgcaatagtgtgttggaattttttgtgtctctcactcggaaggacataagggcggccgcggtacccgtgaggctccggtgcccgtcagtgggcagagcgcacatcgcccacagtccccgagaagttggggggaggggtcggcaattgaaccggtgcctagagaaggtggcgcggggtaaactgggaaagtgatgtcgtgtactggctccgcctttttcccgagggtgggggagaaccgtatataagtgcagtagtcgccgtgaacgttctttttcgcaacgggtttgccgccagaacacagtctagaggatccgccgccaccatggagaggaccctggtgtgcctggtggtgatcttcctgggcaccgtggcccacaagagcagccctcaaggccctgataggctgctgattaggctgaggcacctgatcgacatcgtggagcagctgaagatctacgagaacgacctggaccctgagctgctgagcgcccctcaagacgtgaagggccactgcgagcacgccgccttcgcctgctttcagaaggccaagctgaagcctagcaaccctggcaacaacaagaccttcatcatcgacctggtggctcagctgaggaggaggctgcctgctaggaggggcggcaagaagcagaagcacatcgccaagtgccctagctgcgacagctacgagaagaggacccctaaggagttcctggagaggctgaagtggctgctgcagaagatgatccatcagcacctgagctgaac

SEQ ID NO: 213 - protein, 597 aa, Mus musculus; identical to SEQ ID NO: 137

SEQ ID NO: 214 - DNA, 1794 bp, Mus musculus; identical to SEQ ID NO: 138
  source 1..1794: mol_type = genomic DNA

SEQ ID NO: 215 - skipped

SEQ ID NO: 216 - DNA, 3846 bp, synthetic construct; identical to SEQ ID NO: 212
  misc_feature 1..3846: note = HER2-LAMP-IL-21; HER2 (Extracellular domain) +LAMP +EF-1alpha +IL-21; DNA Sequence
  source 1..3846: mol_type = other DNA

SEQ ID NO: 217 - protein, 146 aa, Mus musculus [sequence omitted]

SEQ ID NO: 218 - DNA, 441 bp, Mus musculus
  source 1..441: mol_type = genomic DNA
atggagaggaccctggtgtgcctggtggtgatcttcctgggcaccgtggcccacaagagcagccctcaaggccctgataggctgctgattaggctgaggcacctgatcgacatcgtggagcagctgaagatctacgagaacgacctggaccctgagctgctgagcgcccctcaagacgtgaagggccactgcgagcacgccgccttcgcctgctttcagaaggccaagctgaagcctagcaaccctggcaacaacaagaccttcatcatcgacctggtggctcagctgaggaggaggctgcctgctaggaggggcggcaagaagcagaagcacatcgccaagtgccctagctgcgacagctacgagaagaggacccctaaggagttcctggagaggctgaagtggctgctgcagaagatgatccatcagcacctgagctga

SEQ ID NO: 219 - protein, 453 aa, synthetic construct
  REGION 1..453: note = CD80 (Extracellular Domain +Fc Domain) Protein Sequence
VDEQLSKSVKDKVLLPCRYNSPHEDESEDRIYWQKHDKVVLSVIAGKLKVWPEYKNRTLYDNTTYSLIILGLVLSDRGTYSCVVQKKERGTYEVKHLALVKLSIKADFSTPNITESGNPSADTKRITCFASGGFPKPRFSWLENGRELPGINTTISQDPESELYTISSQLDFNTTRNHTIKCLIKYGDAHVSEDFTWEKPPEDPPDSKNDIGGGGSGGGGSPRGPTIKPCPPCKCPAPNLEGGPSVFIFPPKIKDVLMISLSPIVTCVVVDVSEDDPDVQISWFVNNVEVHTAQTQTHREDYNSTLRVVSALPIQHQDWMSGKAFACAVNNKDLPAPIERTISKPKGSVRAPQVYVLPPPEEEMTKKQVTLTCMVTDFMPEDIYVEWTNNGKTELNYKNTEPVLDSDGSYFMYSKLRVEKKNWVERNSYSCSVVHEGLHNHHTTKSFSRTPGK

SEQ ID NO: 220 - DNA, 1359 bp, synthetic construct
  misc_feature 1..1359: note = CD80 (Extracellular Domain +Fc Domain) DNA Sequence
  source 1..1359: mol_type = other DNA
gtggacgagcagctgagcaagagcgtgaaggacaaggtgctgctgccttgtaggtacaacagccctcacgaggacgagagcgaggataggatctactggcagaagcacgacaaggtagtgctgagtgtgatagccggcaagctgaaggtgtggcctgagtacaagaataggaccctgtacgacaacaccacctacagcctgatcatcctgggcctggtgctgagcgataggggtacctacagctgcgtggtgcagaagaaggagaggggcacctacgaggtgaagcacctggccctggtgaagctgagcatcaaggccgacttcagcacccctaacatcaccgagagcggcaaccctagcgccgacaccaagaggatcacctgcttcgctagcggcggcttccctaagcctaggttcagctggctggagaacggaagggagctgcctggcataaacacgaccatatctcaagaccctgagagcgagctgtacaccatcagctctcagctggacttcaacaccacccgcaatcacaccatcaagtgcctgatcaagtacggcgacgcccacgtgagcgaggacttcacctgggagaagcctcctgaggaccctcctgacagcaagaacgatatcggaggcggaggaagcggaggcggaggaagccccagagggcccacaatcaagccctgtcctccatgcaaatgcccagcacctaacctcgagggtggaccatccgtcttcatcttccctccaaagatcaaggatgtactcatgatctccctgagccccatagtcacatgtgtggtggtggatgtgagcgaggatgacccagatgtccagatcagctggtttgtgaacaacgtggaagtacacacagctcagacacaaacccatagagaggattacaacagtactctccgggtggtcagtgccctccccatccagcaccaggactggatgagtggcaaggcgttcgcatgcgcggtcaacaacaaagacctcccagcgcccatcgagagaaccatctcaaaacccaaagggtcagtaagagctccacaggtatatgtcttgcctccaccagaagaagagatgactaagaaacaggtcactctgacctgcatggtcacagacttcatgcctgaagacatttacgtggagtggaccaacaacgggaaaacagagctaaactacaagaacactgaaccagtcctggactctgatggttcttacttcatgtacagcaagctgagagtggaaaagaagaactgggtggaaagaaatagctactcctgttcagtggtccacgagggtctgcacaatcaccacacgactaagagcttctcccggactccgggtaaa

SEQ ID NO: 221 - protein, 506 aa, synthetic construct
  REGION 1..506: note = NY-ESO1-LAMP Protein Sequence
MAPRSARRPLLLLLLLLLLGLMHCASAAMFMVKNGNGTACIMANFSAAFSVNYDTKSGPKNMTLDLPSDATVVLNRSSCGKENTSDPSLVIAFGRGHTLTLNFTRNATRYSVQLMSFVYNLSDTHLFPNASSKEIKTVESITDIRADIDKKYRCVSGTQVHMNNVTVTLHDATIQAYLSNSSFSRGETRCEQDLEMQAEGRGTGGSTGDADGPGGPGIPDGPGGNAGGPGEAGATGGRGPRGAGAARASGPGGGAPRGPHGGAASGLNGCCRCGARGPESRLLEFYLAMPFATPMEAELARRSLAQDAPPLPVPGVLLKEFTVSGNILTIRLTAADHRQLQLSISSCLQQQRRTCLLASMGLQLNLTYERKDNTTVTRLLNINPNKTSASGSCGAHLVTLELHSEGTTVLLFQFGMNASSSRFFLQGIQLNTILPDARDPAFKAANGSLRALQATVGNSYKCNAEEHVRVTKAFSVNIFKVWVQAFKVEGGQFGSVEECLLDENSM

SEQ ID NO: 222 - DNA, 2452 bp, synthetic construct
  misc_feature 1..2452: note = NY-ESO1-LAMP-IL-15; NY-ESO1 +LAMP +EF-1alpha +Ig-Kappa +IL-15; DNA Sequence
  source 1..2452: mol_type = other DNA
atggcgccccgcagcgcccggcgacccctgctgctgctactgctgttgctgctgctcggcctcatgcattgtgcgtcagcagcaatgtttatggtgaaaaatggcaacgggaccgcgtgcataatggccaacttctctgctgccttctcagtgaactacgacaccaagagtggccctaagaacatgacccttgacctgccatcagatgccacagtggtgctcaaccgcagctcctgtggaaaagagaacacttctgaccccagtctcgtgattgcttttggaagaggacatacactcactctcaatttcacgagaaatgcaacacgttacagcgtccagctcatgagttttgtttataacttgtcagacacacaccttttccccaatgcgagctccaaagaaatcaagactgtggaatctataactgacatcagggcagatatagataaaaaatacagatgtgttagtggcacccaggtccacatgaacaacgtgaccgtaacgctccatgatgccaccatccaggcgtacctttccaacagcagcttcagccggggagagacacgctgtgaacaagacctcgagatgcaagccgaaggcagaggaaccggtggatctactggggatgctgatggtcccggtggacccggtattccagatggacccggcggaaatgctggcggtcccggcgaagctggtgctactggtggaagaggaccaagaggcgctggtgccgctagagcttctggccccggtggcggagcccctagaggaccacatggcggagctgcatctggactgaatggctgctgtagatgcggcgccagaggaccagaaagccggctgcttgagttctatctggccatgcctttcgccacaccaatggaagccgagctggctagacgcagtctggcccaagatgctcctccacttccagttccgggcgtgctgctgaaagagtttaccgtcagcggcaacattctgaccatccggctgacagccgccgaccatagacagctgcaactgagcatctccagctgcctccagcagcagagaagagaattcacctgcctgctggccagcatggggctgcagctgaacctcacctatgagaggaaggacaacacgacggtgacaaggcttctcaacatcaaccccaacaagacctcggccagcgggagctgcggcgcccacctggtgactctggagctgcacagcgagggcaccaccgtcctgctcttccagttcgggatgaatgcaagttctagccggtttttcctacaaggaatccagttgaatacaattcttcctgacgccagagaccctgcctttaaagctgccaacggctccctgcgagcgctgcaggccacagtcggcaattcctacaagtgcaacgcggaggagcacgtccgtgtcacgaaggcgttttcagtcaatatattcaaagtgtgggtccaggctttcaaggtggaaggtggccagtttggctctgtggaggagtgtctgctggacgagaacagcatgctgatccccatcgctgtgggtggtgccctggcggggctggtcctcatcgtcctcatcgcctacctcgtcggcaggaagaggagtcacgcaggctaccagactatctagtaaagatctttttccctctgccaaaaattatggggacatcatgaagccccttgagcatctgacttctggctaataaaggaaatttattttcattgcaatagtgtgttggaattttttgtgtctctcactcggaaggacataagggcggccgcggtacccgtgaggctccggtgcccgtcagtgggcagagcgcacatcgcccacagtccccgagaagttggggggaggggtcggcaattgaaccggtgcctagagaaggtggcgcggggtaaactgggaaagtgatgtcgtgtactggctccgcctttttcccgagggtgggggagaaccgtatataagtgcagtagtcgccgtgaacgttctttttcgcaacgggtttgccgccagaacacagtctagaggatccgccgccaccatggaaaccgatacactgctgctgtgggtgctgttgctctgggttccaggatctacaggcgacaactggatcgacgtccgctacgacctggaaaagatcgagagcctgatccagagcatccacatcgacaccacactgtacaccgacagcgactttcaccccagctgcaaagtgaccgccatgaactgctttctgctggaactgcaagtgatcctgcacgagtacagcaacatgaccctgaacgagacagtgcggaacgtgctgtacctggccaatagcaccctgagcagcaacaagaacgtggccgagagcggctgcaaagagtgcgaggaactggaagagaaaaccttcaccgagtttctgcagagcttcatccggatcgtgcagatgttcatcaacaccagc

SEQ ID NO: 223 - protein, 158 aa, synthetic construct
  REGION 1..158: note = NY-ESO1 Protein Sequence
MQAEGRGTGGSTGDADGPGGPGIPDGPGGNAGGPGEAGATGGRGPRGAGAARASGPGGGAPRGPHGGAASGLNGCCRCGARGPESRLLEFYLAMPFATPMEAELARRSLAQDAPPLPVPGVLLKEFTVSGNILTIRLTAADHRQLQLSISSCLQQQRR

SEQ ID NO: 224 - DNA, 474 bp, synthetic construct
  misc_feature 1..474: note = NY-ESO1 (-tm) DNA Sequence
  source 1..474: mol_type = other DNA
atgcaagccgaaggcagaggaaccggtggatctactggggatgctgatggtcccggtggacccggtattccagatggacccggcggaaatgctggcggtcccggcgaagctggtgctactggtggaagaggaccaagaggcgctggtgccgctagagcttctggccccggtggcggagcccctagaggaccacatggcggagctgcatctggactgaatggctgctgtagatgcggcgccagaggaccagaaagccggctgcttgagttctatctggccatgcctttcgccacaccaatggaagccgagctggctagacgcagtctggcccaagatgctcctccacttccagttccgggcgtgctgctgaaagagtttaccgtcagcggcaacattctgaccatccggctgacagccgccgaccatagacagctgcaactgagcatctccagctgcctccagcagcagagaaga

SEQ ID NO: 225 - protein, 135 aa, synthetic construct
  REGION 1..135: note = Ig-kappa and IL-15 protein sequence
METDTLLLWVLLLWVPGSTGDNWIDVRYDLEKIESLIQSIHIDTTLYTDSDFHPSCKVTAMNCFLLELQVILHEYSNMTLNETVRNVLYLANSTLSSNKNVAESGCKECEELEEKTFTEFLQSFIRIVQMFINTS

SEQ ID NO: 226-228 - skipped (3 entries)

SEQ ID NO: 229 - protein, 1583 aa, synthetic construct
  REGION 1..1583: note = Spike-LAMP-sCD40L; SARS-CoV-2 B.1.351 Spike (South Africa Variant, without SP and TM) +LAMP +EF-1alpha +SPD +sCD40L; Protein Sequence
MAPRSARRPLLLLLLLLLLGLMHCASAAMFMVKNGNGTACIMANFSAAFSVNYDTKSGPKNMTLDLPSDATVVLNRSSCGKENTSDPSLVIAFGRGHTLTLNFTRNATRYSVQLMSFVYNLSDTHLFPNASSKEIKTVESITDIRADIDKKYRCVSGTQVHMNNVTVTLHDATIQAYLSNSSFSRGETRCEQDLEVNFTTRTQLPPAYTNSFTRGVYYPDKVFRSSVLHSTQDLFLPFFSNVTWFHAIHVSGTNGTKRFANPVLPFNDGVYFASTEKSNIIRGWIFGTTLDSKTQSLLIVNNATNVVIKVCEFQFCNDPFLGVYYHKNNKSWMESEFRVYSSANNCTFEYVSQPFLMDLEGKQGNFKNLREFVFKNIDGYFKIYSKHTPINLVRGLPQGFSALEPLVDLPIGINITRFQTLHISYLTPGDSSSGWTAGAAAYYVGYLQPRTFLLKYNENGTITDAVDCALDPLSETKCTLKSFTVEKGIYQTSNFRVQPTESIVRFPNITNLCPFGEVFNATRFASVYAWNRKRISNCVADYSVLYNSASFSTFKCYGVSPTKLNDLCFTNVYADSFVIRGDEVRQIAPGQTGNIADYNYKLPDDFTGCVIAWNSNNLDSKVGGNYNYLYRLFRKSNLKPFERDISTEIYQAGSTPCNGVKGFNCYFPLQSYGFQPTYGVGYQPYRVVVLSFELLHAPATVCGPKKSTNLVKNKCVNFNFNGLTGTGVLTESNKKFLPFQQFGRDIADTTDAVRDPQTLEILDITPCSFGGVSVITPGTNTSNQVAVLYQGVNCTEVPVAIHADQLTPTWRVYSTGSNVFQTRAGCLIGAEHVNNSYECDIPIGAGICASYQTQTNSPRRARSVASQSIIAYTMSLGVENSVAYSNNSIAIPTNFTISVTTEILPVSMTKTSVDCTMYICGDSTECSNLLLQYGSFCTQLNRALTGIAVEQDKNTQEVFAQVKQIYKTPPIKDFGGFNFSQILPDPSKPSKRSFIEDLLFNKVTLADAGFIKQYGDCLGDIAARDLICAQKFNGLTVLPPLLTDEMIAQYTSALLAGTITSGWTFGAGAALQIPFAMQMAYRFNGIGVTQNVLYENQKLIANQFNSAIGKIQDSLSSTASALGKLQDVVNQNAQALNTLVKQLSSNFGAISSVLNDILSRLDKVEAEVQIDRLITGRLQSLQTYVTQQLIRAAEIRASANLAATKMSECVLGQSKRVDFCGKGYHLMSFPQSAPHGVVFLHVTYVPAQEKNFTTAPAICHDGKAHFPREGVFVSNGTHWFVTQRNFYEPQIITTDNTFVSGNCDVVIGIVNNTVYDPLQPELDSFKEELDKYFKNHTSPDVDLGDISGINASVVNIQKEIDRLNEVAKNLNESLIDLQELGKYEQYIKWPWYCMTSCCSCLKGCCSCGSCCKFDEDDSEPVLKGVKLHYTTCLLASMGLQLNLTYERKDNTTVTRLLNINPNKTSASGSCGAHLVTLELHSEGTTVLLFQFGMNASSSRFFLQGIQLNTILPDARDPAFKAANGSLRALQATVGNSYKCNAEEHVRVTKAFSVNIFKVWVQAFKVEGGQFGSVEECLLDENSM

SEQ ID NO: 230 - DNA, 6688 bp, synthetic construct
  misc_feature 1..6688: note = Spike-LAMP-sCD40L; SARS-CoV-2 B.1.351 Spike (South Africa Variant, Without SP and TM) +LAMP +EF-1alpha +SPD +sCD40L; DNA Sequence
  source 1..6688: mol_type = other DNA
atggcgccccgcagcgcccggcgacccctgctgctgctactgctgttgctgctgctcggcctcatgcattgtgcgtcagcagcaatgtttatggtgaaaaatggcaacgggaccgcgtgcataatggccaacttctctgctgccttctcagtgaactacgacaccaagagtggccctaagaacatgacccttgacctgccatcagatgccacagtggtgctcaaccgcagctcctgtggaaaagagaacacttctgaccccagtctcgtgattgcttttggaagaggacatacactcactctcaatttcacgagaaatgcaacacgttacagcgtccagctcatgagttttgtttataacttgtcagacacacaccttttccccaatgcgagctccaaagaaatcaagactgtggaatctataactgacatcagggcagatatagataaaaaatacagatgtgttagtggcacccaggtccacatgaacaacgtgaccgtaacgctccatgatgccaccatccaggcgtacctttccaacagcagcttcagccggggagagacacgctgtgaacaagacctcgaggtcaacttcaccaccagaacacagctgcctccagcctacaccaacagcttcaccagaggcgtgtactaccccgacaaggtgttcagatccagcgtgctgcactctacccaggacctgttcctgcctttcttcagcaacgtgacctggttccacgccatccacgtgtccggcaccaatggcaccaagagattcgccaatcctgtgctgcccttcaacgacggggtgtactttgccagcaccgagaagtccaacatcatcagaggctggatcttcggcaccacactggacagcaagacccagagcctgctgatcgtgaacaacgccaccaacgtggtcatcaaagtgtgcgagttccagttctgcaacgaccccttcctgggcgtctactaccacaagaacaacaagagctggatggaaagcgagttccgggtgtacagcagcgccaacaactgcaccttcgagtacgtgtcccagcctttcctgatggacctggaaggcaagcagggcaacttcaagaacctgcgcgagttcgtgttcaagaacatcgacggctacttcaaaatctacagcaagcacacccctatcaacctcgtgcggggactgcctcagggcttttctgctctggaacccctggtggatctgcccatcggcatcaacatcacccggtttcagaccctgcacatcagctacctgacacctggcgatagcagctctggatggacagctggcgccgctgcctactatgtgggatacctgcagcctcggaccttcctgctgaagtacaacgagaacggcaccatcaccgacgccgtggattgtgctctggatcctctgagcgagacaaagtgcaccctgaagtccttcaccgtggaaaagggcatctaccagaccagcaacttccgggtgcagcccaccgaatccatcgtgcggttccccaatatcaccaatctgtgccccttcggcgaggtgttcaatgccaccagattcgcctctgtgtacgcctggaaccggaagcggatcagcaattgcgtggccgactactccgtgctgtacaactccgccagcttcagcaccttcaagtgctacggcgtgtcccctaccaagctgaacgacctgtgcttcacaaacgtgtacgccgacagcttcgtgatccggggagatgaagtgcggcagattgcccctggacagaccggcaatatcgccgactacaactacaagctgcccgacgacttcaccggctgtgtgattgcctggaacagcaacaacctggactccaaagtcggcggcaactacaattacctgtaccggctgttccggaagtccaatctgaagcccttcgagcgggacatcagcaccgaaatctatcaggccggcagcaccccttgcaatggcgtgaagggctttaactgctacttcccactgcagtcctacggcttccagccaacatacggcgtgggctaccagccttacagagtggtggtgctgagcttcgagctgctgcatgctcctgccacagtgtgcggccctaagaaaagcaccaatctcgtgaagaacaaatgcgtgaacttcaacttcaacggcctgaccggcaccggcgtgctgacagagagcaacaagaagttcctgccattccagcagttcggccgggacattgccgataccacagatgctgtcagagatccccagacactggaaatcctggacatcaccccatgcagcttcggcggagtgtctgtgatcacccctggcaccaacaccagcaatcaggtggcagtgctgtaccagggcgtgaactgtacagaggtgccagtggccattcacgccgatcagctgacccctacttggcgggtgtactccacaggcagcaatgtgttccagaccagagccggctgtctgatcggagccgagcacgtgaacaatagctacgagtgcgacatccccatcggcgctggcatctgtgccagctatcagacccagacaaacagccccagacgggctagaagtgtggccagccagagcatcattgcctacacaatgtctctgggcgtcgagaacagcgtggcctactccaacaactctatcgctatccccaccaatttcaccatcagcgtgaccaccgagatcctgcctgtgtccatgaccaagaccagcgtggactgcaccatgtacatctgcggcgattccaccgagtgctccaacctgctgctgcagtacggcagcttctgcacccagctgaatagagccctgacagggatcgccgtggaacaggacaagaacacccaagaggtgttcgcccaagtgaagcaaatctacaagacccctcctatcaaggacttcggcggcttcaatttcagccagattctgcccgatcctagcaagcccagcaagcggagcttcatcgaggacctgctgttcaacaaagtgacactggccgacgccggcttcatcaagcagtatggcgattgtctgggcgacattgcagcccgggatctgatttgcgcccagaagtttaacggactgaccgtgctgcctcctctgctgaccgatgagatgatcgcccagtacacatctgccctgctggccggcacaatcacaagcggctggacatttggagctggcgctgccctgcagatcccctttgctatgcagatggcctaccggttcaacggcatcggagtgacccagaatgtgctgtacgagaaccagaagctgatcgccaaccagttcaacagcgccatcggcaagatccaggacagcctgagcagcacagccagcgctctgggaaagctgcaggacgtggtcaaccagaatgcccaggcactgaacaccctggtcaagcagctgtctagcaacttcggcgccatcagctctgtgctgaacgatatcctgagcagactggacaaggtggaagccgaggtgcagatcgacagactgatcaccggaaggctgcagtccctgcagacctacgttacccagcagctgatcagagccgccgagattagagcctctgccaatctggccgccaccaagatgtctgagtgtgtgctgggccagagcaagagagtggacttttgcggcaagggctaccacctgatgagcttccctcagtctgcaccacacggcgtggtgtttctgcacgtgacatacgtgcccgctcaagagaagaacttcacaacagcccctgccatctgccacgacggcaaagcccactttcctagagaaggcgtgttcgtgtccaacggcacccattggttcgtgacccagcggaacttctacgagccccagatcatcaccaccgacaacaccttcgtgtctggcaactgcgacgtcgtgatcggcattgtgaacaataccgtgtacgaccctctgcagcccgagctggacagcttcaaagaggaactggataagtactttaagaaccacacaagccccgacgtggacctgggcgatatcagcggaatcaatgccagcgtcgtgaacatccagaaagagatcgaccggctgaacgaggtggccaagaatctgaacgagagcctgatcgacctgcaagaactggggaagtacgagcagtacatcaagtggccttggtactgcatgaccagctgctgtagctgcctgaagggctgttgcagctgtggctcctgctgcaagttcgacgaggacgattctgagcccgtgctgaaaggcgtgaagctgcactacacagaattcacctgcctgctggccagcatggggctgcagctgaacctcacctatgagaggaaggacaacacgacggtgacaaggcttctcaacatcaaccccaacaagacctcggccagcgggagctgcggcgcccacctggtgactctggagctgcacagcgagggcaccaccgtcctgctcttccagttcgggatgaatgcaagttctagccggtttttcctacaaggaatccagttgaatacaattcttcctgacgccagagaccctgcctttaaagctgccaacggctccctgcgagcgctgcaggccacagtcggcaattcctacaagtgcaacgcggaggagcacgtccgtgtcacgaaggcgttttcagtcaatatattcaaagtgtgggtccaggctttcaaggtggaaggtggccagtttggctctgtggaggagtgtctgctggacgagaacagcatgctgatccccatcgctgtgggtggtgccctggcggggctggtcctcatcgtcctcatcgcctacctcgtcggcaggaagaggagtcacgcaggctaccagactatctagtaaagatctttttccctctgccaaaaattatggggacatcatgaagccccttgagcatctgacttctggctaataaaggaaatttattttcattgcaatagtgtgttggaattttttgtgtctctcactcggaaggacataagggcggccgcggtacccgtgaggctccggtgcccgtcagtgggcagagcgcacatcgcccacagtccccgagaagttggggggaggggtcggcaattgaaccggtgcctagagaaggtggcgcggggtaaactgggaaagtgatgtcgtgtactggctccgcctttttcccgagggtgggggagaaccgtatataagtgcagtagtcgccgtgaacgttctttttcgcaacgggtttgccgccagaacacagtctagaggatccgccgccaccatgctgccctttctctccatgcttgtcttgcttgtacagcccctgggaaatctgggagcagaaatgaagagcctctcgcagagatcagtacccaacacctgcaccctagtcatgtgtagcccaacagagaatggcctgcctggtcgtgatggacgggatgggagagaaggtccacggggtgagaagggtgatccaggtttgccaggacctatggggctctcagggttgcagggccctacaggtccagttggacccaaaggagagaatggctctgctggcgaacctggaccaaagggagaacgtggactaagtggacctccaggacttccaggtattcctggtccagctgggaaagaaggtccctctgggaagcaggggaacataggacctcaaggcaaaccaggtcctaaaggagaggctgggcccaaaggagaagtaggtgctcctggcatgcaaggatctacaggggcaaaaggctccacaggccccaagggagaaagaggtgcccctggtgtgcaaggagccccagggaatgctggagcagcaggacctgccggacctgccggtccacagggagctccaggttccagggggcccccaggactcaagggggacagaggtgttcctggagacagaggaatcaaaggtgaaagcgggcttccagacagtgctgctctgaggcagcagatggaggccttaaaaggaaaactacagcgtctagaggttgccttctcccactatcagaaagctgcattgttccctgatggccatagaagattggataaggtcgaagaggaagtaaaccttcatgaagattttgtattcataaaaaagctaaagagatgcaacaaaggagaaggatctttatccttgctgaactgtgaggagatgagaaggcaatttgaagaccttgtcaaggatataacgttaaacaaagaagagaaaaaagaaaacagctttgaaatgcaaagaggtgatgaggatcctcaaattgcagcacacgttgtaagcgaagccaacagtaatgcagcatccgttctacagtgggccaagaaaggatattataccatgaaaagcaacttggtaatgcttgaaaatgggaaacagctgacggttaaaagagaaggactctattatgtctacactcaagtcaccttctgctctaatcgggagccttcgagtcaacgcccattcatcgtcggcctctggctgaagcccagcagtggatctgagagaatcttactcaaggcggcaaatacccacagttcctcccagctttgcgagcagcagtctgttcacttgggcggagtgtttgaattacaagctggtgcttctgtgtttgtcaacgtgactgaagcaagccaagtgatccacagagttggcttctcatcttttggcttactcaaactc

SEQ ID NO: 231 - protein, 1235 aa, synthetic construct
  REGION 1..1235: note = SARS-COV-2 B.1.351 SPIKE (South African Variant (Without SP and TM); Protein Sequence
VNFTTRTQLPPAYTNSFTRGVYYPDKVFRSSVLHSTQDLFLPFFSNVTWFHAIHVSGTNGTKRFANPVLPFNDGVYFASTEKSNIIRGWIFGTTLDSKTQSLLIVNNATNVVIKVCEFQFCNDPFLGVYYHKNNKSWMESEFRVYSSANNCTFEYVSQPFLMDLEGKQGNFKNLREFVFKNIDGYFKIYSKHTPINLVRGLPQGFSALEPLVDLPIGINITRFQTLHISYLTPGDSSSGWTAGAAAYYVGYLQPRTFLLKYNENGTITDAVDCALDPLSETKCTLKSFTVEKGIYQTSNFRVQPTESIVRFPNITNLCPFGEVFNATRFASVYAWNRKRISNCVADYSVLYNSASFSTFKCYGVSPTKLNDLCFTNVYADSFVIRGDEVRQIAPGQTGNIADYNYKLPDDFTGCVIAWNSNNLDSKVGGNYNYLYRLFRKSNLKPFERDISTEIYQAGSTPCNGVKGFNCYFPLQSYGFQPTYGVGYQPYRVVVLSFELLHAPATVCGPKKSTNLVKNKCVNFNFNGLTGTGVLTESNKKFLPFQQFGRDIADTTDAVRDPQTLEILDITPCSFGGVSVITPGTNTSNQVAVLYQGVNCTEVPVAIHADQLTPTWRVYSTGSNVFQTRAGCLIGAEHVNNSYECDIPIGAGICASYQTQTNSPRRARSVASQSIIAYTMSLGVENSVAYSNNSIAIPTNFTISVTTEILPVSMTKTSVDCTMYICGDSTECSNLLLQYGSFCTQLNRALTGIAVEQDKNTQEVFAQVKQIYKTPPIKDFGGFNFSQILPDPSKPSKRSFIEDLLFNKVTLADAGFIKQYGDCLGDIAARDLICAQKFNGLTVLPPLLTDEMIAQYTSALLAGTITSGWTFGAGAALQIPFAMQMAYRFNGIGVTQNVLYENQKLIANQFNSAIGKIQDSLSSTASALGKLQDVVNQNAQALNTLVKQLSSNFGAISSVLNDILSRLDKVEAEVQIDRLITGRLQSLQTYVTQQLIRAAEIRASANLAATKMSECVLGQSKRVDFCGKGYHLMSFPQSAPHGVVFLHVTYVPAQEKNFTTAPAICHDGKAHFPREGVFVSNGTHWFVTQRNFYEPQIITTDNTFVSGNCDVVIGIVNNTVYDPLQPELDSFKEELDKYFKNHTSPDVDLGDISGINASVVNIQKEIDRLNEVAKNLNESLIDLQELGKYEQYIKWPWYCMTSCCSCLKGCCSCGSCCKFDEDDSEPVLKGVKLHYT

SEQ ID NO: 232 - DNA, 3705 bp, synthetic construct
  misc_feature 1..3705: note = SARS-COV-2 B.1.351 SPIKE (South African Variant (Without SP and TM); DNA Sequence
  source 1..3705: mol_type = other DNA
gtgaactttaccacccgcacccagctgccgccggcgtataccaacagctttacccgcggcgtgtattatccggataaagtgtttcgcagcagcgtgctgcatagcacccaggatctgtttctgccgttttttagcaacgtgacctggtttcatgcgattcatgtgagcggcaccaacggcaccaaacgctttgcgaacccggtgctgccgtttaacgatggcgtgtattttgcgagcaccgaaaaaagcaacattattcgcggctggatttttggcaccaccctggatagcaaaacccagagcctgctgattgtgaacaacgcgaccaacgtggtgattaaagtgtgcgaatttcagttttgcaacgatccgtttctgggcgtgtattatcataaaaacaacaaaagctggatggaaagcgaatttcgcgtgtatagcagcgcgaacaactgcacctttgaatatgtgagccagccgtttctgatggatctggaaggcaaacagggcaactttaaaaacctgcgcgaatttgtgtttaaaaacattgatggctattttaaaatttatagcaaacataccccgattaacctggtgcgcggcctgccgcagggctttagcgcgctggaaccgctggtggatctgccgattggcattaacattacccgctttcagaccctgcatattagctatctgaccccgggcgatagcagcagcggctggaccgcgggcgcggcggcgtattatgtgggctatctgcagccgcgcacctttctgctgaaatataacgaaaacggcaccattaccgatgcggtggattgcgcgctggatccgctgagcgaaaccaaatgcaccctgaaaagctttaccgtggaaaaaggcatttatcagaccagcaactttcgcgtgcagccgaccgaaagcattgtgcgctttccgaacattaccaacctgtgcccgtttggcgaagtgtttaacgcgacccgctttgcgagcgtgtatgcgtggaaccgcaaacgcattagcaactgcgtggcggattatagcgtgctgtataacagcgcgagctttagcacctttaaatgctatggcgtgagcccgaccaaactgaacgatctgtgctttaccaacgtgtatgcggatagctttgtgattcgcggcgatgaagtgcgccagattgcgccgggccagaccggcaacattgcggattataactataaactgccggatgattttaccggctgcgtgattgcgtggaacagcaacaacctggatagcaaagtgggcggcaactataactatctgtatcgcctgtttcgcaaaagcaacctgaaaccgtttgaacgcgatattagcaccgaaatttatcaggcgggcagcaccccgtgcaacggcgtgaaaggctttaactgctattttccgctgcagagctatggctttcagccgacctatggcgtgggctatcagccgtatcgcgtggtggtgctgagctttgaactgctgcatgcgccggcgaccgtgtgcggcccgaaaaaaagcaccaacctggtgaaaaacaaatgcgtgaactttaactttaacggcctgaccggcaccggcgtgctgaccgaaagcaacaaaaaatttctgccgtttcagcagtttggccgcgatattgcggataccaccgatgcggtgcgcgatccgcagaccctggaaattctggatattaccccgtgcagctttggcggcgtgagcgtgattaccccgggcaccaacaccagcaaccaggtggcggtgctgtatcagggcgtgaactgcaccgaagtgccggtggcgattcatgcggatcagctgaccccgacctggcgcgtgtatagcaccggcagcaacgtgtttcagacccgcgcgggctgcctgattggcgcggaacatgtgaacaacagctatgaatgcgatattccgattggcgcgggcatttgcgcgagctatcagacccagaccaacagcccgcgccgcgcgcgcagcgtggcgagccagagcattattgcgtataccatgagcctgggcgtggaaaacagcgtggcgtatagcaacaacagcattgcgattccgaccaactttaccattagcgtgaccaccgaaattctgccggtgagcatgaccaaaaccagcgtggattgcaccatgtatatttgcggcgatagcaccgaatgcagcaacctgctgctgcagtatggcagcttttgcacccagctgaaccgcgcgctgaccggcattgcggtggaacaggataaaaacacccaggaagtgtttgcgcaggtgaaacagatttataaaaccccgccgattaaagattttggcggctttaactttagccagattctgccggatccgagcaaaccgagcaaacgcagctttattgaagatctgctgtttaacaaagtgaccctggcggatgcgggctttattaaacagtatggcgattgcctgggcgatattgcggcgcgcgatctgatttgcgcgcagaaatttaacggcctgaccgtgctgccgccgctgctgaccgatgaaatgattgcgcagtataccagcgcgctgctggcgggcaccattaccagcggctggacctttggcgcgggcgcggcgctgcagattccgtttgcgatgcagatggcgtatcgctttaacggcattggcgtgacccagaacgtgctgtatgaaaaccagaaactgattgcgaaccagtttaacagcgcgattggcaaaattcaggatagcctgagcagcaccgcgagcgcgctgggcaaactgcaggatgtggtgaaccagaacgcgcaggcgctgaacaccctggtgaaacagctgagcagcaactttggcgcgattagcagcgtgctgaacgatattctgagccgcctggataaagtggaagcggaagtgcagattgatcgcctgattaccggccgcctgcagagcctgcagacctatgtgacccagcagctgattcgcgcggcggaaattcgcgcgagcgcgaacctggcggcgaccaaaatgagcgaatgcgtgctgggccagagcaaacgcgtggatttttgcggcaaaggctatcatctgatgagctttccgcagagcgcgccgcatggcgtggtgtttctgcatgtgacctatgtgccggcgcaggaaaaaaactttaccaccgcgccggcgatttgccatgatggcaaagcgcattttccgcgcgaaggcgtgtttgtgagcaacggcacccattggtttgtgacccagcgcaacttttatgaaccgcagattattaccaccgataacacctttgtgagcggcaactgcgatgtggtgattggcattgtgaacaacaccgtgtatgatccgctgcagccggaactggatagctttaaagaagaactggataaatattttaaaaaccataccagcccggatgtggatctgggcgatattagcggcattaacgcgagcgtggtgaacattcagaaagaaattgatcgcctgaacgaagtggcgaaaaacctgaacgaaagcctgattgatctgcaggaactgggcaaatatgaacagtatattaaatggccgtggtattgcatgaccagctgctgcagctgcctgaaaggctgctgcagctgcggcagctgctgcaaatttgatgaagatgatagcgaaccggtgctgaaaggcgtgaaactgcattatacc

SEQ ID NO: 233 - protein, 470 aa, synthetic construct; identical to SEQ ID NO: 196
  REGION 1..470: note = SPD-xCD40L protein sequence

SEQ ID NO: 234 - protein, 966 aa, synthetic construct
  REGION 1..966: note = CD161-LAMP Protein Sequence
MAPRSARRPLLLLLLLLLLGLMHCASAAMFMVKNGNGTACIMANFSAAFSVNYDTKSGPKNMTLDLPSDATVVLNRSSCGKENTSDPSLVIAFGRGHTLTLNFTRNATRYSVQLMSFVYNLSDTHLFPNASSKEIKTVESITDIRADIDKKYRCVSGTQVHMNNVTVTLHDATIQAYLSNSSFSRGETRCEQDLEQKSSIEKCSVDIQQSRNKTTERPGLLNCPIYWQQLREKCLLFSHTVNPWNNSLADCSTKESSLLLIRDKDELIHTQNLIRDKAILFWIGLNFSLSEKNWKWINGSFLNSNDLEIRGDAKENSCISISQTSVYSEYCSTEIRWICQKELTPVRNKVYPDSTQVCTGTDMKLRLPASPETHLDMLRHLYQGCQVVQGNLELTYLPTNASLSFLQDIQEVQGYVLIAHNQVRQVPLQRLRIVRGTQLFEDNYALAVLDNGDPLNNTTPVTGASPGGLRELQLRSLTEILKGGVLIQRNPQLCYQDTILWKDIFHKNNQLALTLIDTNRSRACHPCSPMCKGSRCWGESSEDCQSLTRTVCAGGCARCKGPLPTDCCHEQCAAGCTGPKHSDCLACLHFNHSGICELHCPALVTYNTDTFESMPNPEGRYTFGASCVTACPYNYLSTDVGSCTLVCPLHNQEVTAEDGTQRCEKCSKPCARVCYGLGMEHLREVRAVTSANIQEFAGCKKIFGSLAFLPESFDGDPASNTAPLQPEQLQVFETLEEITGYLYISAWPDSLPDLSVFQNLQVIRGRILHNGAYSLTLQGLGISWLGLRSLRELGSGLALIHHNTHLCFVHTVPWDQLFRNPHQALLHTANRPEDECVGEGLACHQLCARGHCWGPGPTQCVNCSQFLRGQECVEECRVLQGLPREYVNARHCLPCHPECQPQNGSVTCFGPEADQCVACAHYKDPPFCVARCPSGVKPDLSYMPIWKFPDEEGACQPCPINCTHEF

SEQ ID NO: 235 - DNA, 3523 bp, synthetic construct
  misc_feature 1..3523: note = CD161-LAMP-sCD40L; CD161 (Extracellular Domain) +LAMP +EF-1alpha +SPD +sCD40L; DNA Sequence
  source 1..3523: mol_type = other DNA
atggcgccccgcagcgcccggcgacccctgctgctgctactgctgttgctgctgctcggcctcatgcattgtgcgtcagcagcaatgtttatggtgaaaaatggcaacgggaccgcgtgcataatggccaacttctctgctgccttctcagtgaactacgacaccaagagtggccctaagaacatgacccttgacctgccatcagatgccacagtggtgctcaaccgcagctcctgtggaaaagagaacacttctgaccccagtctcgtgattgcttttggaagaggacatacactcactctcaatttcacgagaaatgcaacacgttacagcgtccagctcatgagttttgtttataacttgtcagacacacaccttttccccaatgcgagctccaaagaaatcaagactgtggaatctataactgacatcagggcagatatagataaaaaatacagatgtgttagtggcacccaggtccacatgaacaacgtgaccgtaacgctccatgatgccaccatccaggcgtacctttccaacagcagcttcagccggggagagacacgctgtgaacaagacctcgagcagaagtccagcatcgagaagtgcagcgtggacatccagcagagccggaacaagaccaccgaaagacccggcctgctgaactgccctatctactggcagcagctgagagagaagtgcctgctgttcagccacaccgtgaatccctggaacaacagcctggccgactgcagcacaaaagagagcagcctgctgctgatcagagacaaggacgagctgatccacacacagaacctgatccgcgacaaggccatcctgttctggatcggcctgaacttcagcctgagcgagaagaactggaagtggatcaacggcagcttcctgaactccaacgacctggaaatccggggcgacgccaaagagaacagctgcatcagcatcagccagaccagcgtgtacagcgagtactgctccaccgagatcagatggatctgccagaaagaactgacccctgtgcggaacaaggtgtaccccgattctgaattcacctgcctgctggccagcatggggctgcagctgaacctcacctatgagaggaaggacaacacgacggtgacaaggcttctcaacatcaaccccaacaagacctcggccagcgggagctgcggcgcccacctggtgactctggagctgcacagcgagggcaccaccgtcctgctcttccagttcgggatgaatgcaagttctagccggtttttcctacaaggaatccagttgaatacaattcttcctgacgccagagaccctgcctttaaagctgccaacggctccctgcgagcgctgcaggccacagtcggcaattcctacaagtgcaacgcggaggagcacgtccgtgtcacgaaggcgttttcagtcaatatattcaaagtgtgggtccaggctttcaaggtggaaggtggccagtttggctctgtggaggagtgtctgctggacgagaacagcatgctgatccccatcgctgtgggtggtgccctggcggggctggtcctcatcgtcctcatcgcctacctcgtcggcaggaagaggagtcacgcaggctaccagactatctagtaaagatctttttccctctgccaaaaattatggggacatcatgaagccccttgagcatctgacttctggctaataaaggaaatttattttcattgcaatagtgtgttggaattttttgtgtctctcactcggaaggacataagggcggccgcggtacccgtgaggctccggtgcccgtcagtgggcagagcgcacatcgcccacagtccccgagaagttggggggaggggtcggcaattgaaccggtgcctagagaaggtggcgcggggtaaactgggaaagtgatgtcgtgtactggctccgcctttttcccgagggtgggggagaaccgtatataagtgcagtagtcgccgtgaacgttctttttcgcaacgggtttgccgccagaacacagtctagaggatccgccgccaccatggaaaccgatacactgctgctgtgggtgctgttgctctgggttccaggatctacaggcgacatgctgccctttctctccatgcttgtcttgcttgtacagcccctgggaaatctgggagcagaaatgaagagcctctcgcagagatcagtacccaacacctgcaccctagtcatgtgtagcccaacagagaatggcctgcctggtcgtgatggacgggatgggagagaaggtccacggggtgagaagggtgatccaggtttgccaggacctatggggctctcagggttgcagggccctacaggtccagttggacccaaaggagagaatggctctgctggcgaacctggaccaaagggagaacgtggactaagtggacctccaggacttccaggtattcctggtccagctgggaaagaaggtccctctgggaagcaggggaacataggacctcaaggcaaaccaggtcctaaaggagaggctgggcccaaaggagaagtaggtgctcctggcatgcaaggatctacaggggcaaaaggctccacaggccccaagggagaaagaggtgcccctggtgtgcaaggagccccagggaatgctggagcagcaggacctgccggacctgccggtccacagggagctccaggttccagggggcccccaggactcaagggggacagaggtgttcctggagacagaggaatcaaaggtgaaagcgggcttccagacagtgctgctctgaggcagcagatggaggccttaaaaggaaaactacagcgtctagaggttgccttctcccactatcagaaagctgcattgttccctgatggccatagaagattggataaggtcgaagaggaagtaaaccttcatgaagattttgtattcataaaaaagctaaagagatgcaacaaaggagaaggatctttatccttgctgaactgtgaggagatgagaaggcaatttgaagaccttgtcaaggatataacgttaaacaaagaagagaaaaaagaaaacagctttgaaatgcaaagaggtgatgaggatcctcaaattgcagcacacgttgtaagcgaagccaacagtaatgcagcatccgttctacagtgggccaagaaaggatattataccatgaaaagcaacttggtaatgcttgaaaatgggaaacagctgacggttaaaagagaaggactctattatgtctacactcaagtcaccttctgctctaatcgggagccttcgagtcaacgcccattcatcgtcggcctctggctgaagcccagcagtggatctgagagaatcttactcaaggcggcaaatacccacagttcctcccagctttgcgagcagcagtctgttcacttgggcggagtgtttgaattacaagctggtgcttctgtgtttgtcaacgtgactgaagcaagccaagtgatccacagagttggcttctcatcttttggcttactcaaactc

SEQ ID NO: 236 - protein, 159 aa, synthetic construct
  REGION 1..159: note = CD161 (Extracellular Domain) Protein Sequence
QKSSIEKCSVDIQQSRNKTTERPGLLNCPIYWQQLREKCLLFSHTVNPWNNSLADCSTKESSLLLIRDKDELIHTQNLIRDKAILFWIGLNFSLSEKNWKWINGSFLNSNDLEIRGDAKENSCISISQTSVYSEYCSTEIRWICQKELTPVRNKVYPDS

SEQ ID NO: 237 - DNA, 477 bp, synthetic construct
  misc_feature 1..477: note = CD161 (Extracellular Domain) DNA Sequence
  source 1..477: mol_type = other DNA
cagaagtccagcatcgagaagtgcagcgtggacatccagcagagccggaacaagaccaccgaaagacccggcctgctgaactgccctatctactggcagcagctgagagagaagtgcctgctgttcagccacaccgtgaatccctggaacaacagcctggccgactgcagcacaaaagagagcagcctgctgctgatcagagacaaggacgagctgatccacacacagaacctgatccgcgacaaggccatcctgttctggatcggcctgaacttcagcctgagcgagaagaactggaagtggatcaacggcagcttcctgaactccaacgacctggaaatccggggcgacgccaaagagaacagctgcatcagcatcagccagaccagcgtgtacagcgagtactgctccaccgagatcagatggatctgccagaaagaactgacccctgtgcggaacaaggtgtaccccgattct

SEQ ID NO: 238 - protein, 470 aa, synthetic construct; identical to SEQ ID NO: 196
  REGION 1..470: note = SPD-sCD40L protein sequence

SEQ ID NO: 239 - DNA, 1413 bp, synthetic construct
  misc_feature 1..1413: note = SPD-sCD40L DNA sequence
  source 1..1413: mol_type = other DNA
atgctgccctttctctccatgcttgtcttgcttgtacagcccctgggaaatctgggagcagaaatgaagagcctctcgcagagatcagtacccaacacctgcaccctagtcatgtgtagcccaacagagaatggcctgcctggtcgtgatggacgggatgggagagaaggtccacggggtgagaagggtgatccaggtttgccaggacctatggggctctcagggttgcagggccctacaggtccagttggacccaaaggagagaatggctctgctggcgaacctggaccaaagggagaacgtggactaagtggacctccaggacttccaggtattcctggtccagctgggaaagaaggtccctctgggaagcaggggaacataggacctcaaggcaaaccaggtcctaaaggagaggctgggcccaaaggagaagtaggtgctcctggcatgcaaggatctacaggggcaaaaggctccacaggccccaagggagaaagaggtgcccctggtgtgcaaggagccccagggaatgctggagcagcaggacctgccggacctgccggtccacagggagctccaggttccagggggcccccaggactcaagggggacagaggtgttcctggagacagaggaatcaaaggtgaaagcgggcttccagacagtgctgctctgaggcagcagatggaggccttaaaaggaaaactacagcgtctagaggttgccttctcccactatcagaaagctgcattgttccctgatggccatagaagattggataaggtcgaagaggaagtaaaccttcatgaagattttgtattcataaaaaagctaaagagatgcaacaaaggagaaggatctttatccttgctgaactgtgaggagatgagaaggcaatttgaagaccttgtcaaggatataacgttaaacaaagaagagaaaaaagaaaacagctttgaaatgcaaagaggtgatgaggatcctcaaattgcagcacacgttgtaagcgaagccaacagtaatgcagcatccgttctacagtgggccaagaaaggatattataccatgaaaagcaacttggtaatgcttgaaaatgggaaacagctgacggttaaaagagaaggactctattatgtctacactcaagtcaccttctgctctaatcgggagccttcgagtcaacgcccattcatcgtcggcctctggctgaagcccagcagtggatctgagagaatcttactcaaggcggcaaatacccacagttcctcccagctttgcgagcagcagtctgttcacttgggcggagtgtttgaattacaagctggtgcttctgtgtttgtcaacgtgactgaagcaagccaagtgatccacagagttggcttctcatcttttggcttactcaaactctga

SEQ ID NO: 240 - skipped

SEQ ID NO: 241 - DNA, 4642 bp, synthetic construct
  misc_feature 1..4642: note = HER2-LAMP-OX40L; HER2 (Extracellular Domain) +LAMP +EF-1alpha +IL-2 SP +OX40L (Extracellular Domain +Fc Domain); DNA Sequence
  source 1..4642: mol_type = other DNA
atggcgccccgcagcgcccggcgacccctgctgctgctactgctgttgctgctgctcggcctcatgcattgtgcgtcagcagcaatgtttatggtgaaaaatggcaacgggaccgcgtgcataatggccaacttctctgctgccttctcagtgaactacgacaccaagagtggccctaagaacatgacccttgacctgccatcagatgccacagtggtgctcaaccgcagctcctgtggaaaagagaacacttctgaccccagtctcgtgattgcttttggaagaggacatacactcactctcaatttcacgagaaatgcaacacgttacagcgtccagctcatgagttttgtttataacttgtcagacacacaccttttccccaatgcgagctccaaagaaatcaagactgtggaatctataactgacatcagggcagatatagataaaaaatacagatgtgttagtggcacccaggtccacatgaacaacgtgaccgtaacgctccatgatgccaccatccaggcgtacctttccaacagcagcttcagccggggagagacacgctgtgaacaagacctcgagacacaagtctgcaccggcaccgacatgaagctgagactgcccgccagccccgaaacccatctggacatgctgcggcatctgtaccaaggctgtcaagtggtgcaaggcaatctggaactgacatatctgcctaccaacgcctctctgagctttctgcaagacatccaagaagtgcaaggctacgtcctcattgcccacaaccaagtccgacaagtgccactgcagcggctgagaatcgtgcggggcacccagctgttcgaggacaactatgctctggccgtgctggacaacggcgaccctctgaacaacaccacaccagtgactggcgcctctcccggcggactgagagaactgcagctgcgctctctgaccgagattctgaagggcggcgtgctgatccagcggaaccctcagctgtgctaccaagacaccattctgtggaaggacatcttccacaagaacaaccagctggctctgaccctcatcgacaccaacagaagccgggcttgccacccttgcagccccatgtgcaagggcagcagatgttggggcgagagcagcgaggactgccagtctctgaccagaaccgtgtgtgccggcggatgcgccagatgcaagggccctctgccaaccgattgctgccacgaacagtgcgccgctggctgtaccggccccaagcacagcgattgtctggcttgtctgcacttcaaccactccggcatctgcgagctgcactgcccagccctcgtgacatacaacaccgacacattcgagagcatgcccaaccccgagggcagatacacattcggcgccagctgtgtgaccgcttgcccctacaactatctgagcaccgacgtgggcagctgcaccctcgtgtgccctctgcacaatcaagaagtgaccgccgaggacggcacccagagatgcgagaagtgctccaagccttgcgccagagtgtgctacggactgggcatggaacatctgcgggaagtgcgggccgtgaccagcgccaatatccaagaatttgccggctgcaagaagattttcggcagtctggcctttctgcccgagagcttcgatggcgaccccgcctctaacacagcccctctgcagccagagcagctccaagtgttcgagacactggaagagatcaccggctatctgtacatcagcgcttggcccgactctctgcccgatctgagcgtgttccagaatctgcaagtcatcagaggccggattctgcacaacggcgcctattctctgacactgcaaggactgggaatcagctggctgggactgcggagtctgagagagctgggcagcggactggcactgatccaccacaacacccatctgtgcttcgtgcacaccgtgccttgggatcagctgttccggaatccccaccaagctctgctgcacaccgccaacagacccgaggatgagtgtgtgggcgaggggctggcttgccatcagctctgtgccagaggacactgttggggacccggccctacccagtgcgtgaactgctcccagtttctgcggggccaagaatgcgtggaagagtgcagagtgctccaaggactgccccgcgagtacgtgaacgccagacactgtctgccatgccaccccgagtgccagcctcagaatggcagcgtgacatgcttcggccccgaggccgatcagtgtgtggcttgcgctcactacaaggaccctcccttctgcgtggcccggtgtccttctggcgtgaaacccgatctgtcctacatgcctatctggaagttccccgacgaggaaggcgcttgtcagccttgccccatcaactgcacccacgaattcacctgcctgctggccagcatggggctgcagctgaacctcacctatgagaggaaggacaacacgacggtgacaaggcttctcaacatcaaccccaacaagacctcggccagcgggagctgcggcgcccacctggtgactctggagctgcacagcgagggcaccaccgtcctgctcttccagttcgggatgaatgcaagttctagccggtttttcctacaaggaatccagttgaatacaattcttcctgacgccagagaccctgcctttaaagctgccaacggctccctgcgagcgctgcaggccacagtcggcaattcctacaagtgcaacgcggaggagcacgtccgtgtcacgaaggcgttttcagtcaatatattcaaagtgtgggtccaggctttcaaggtggaaggtggccagtttggctctgtggaggagtgtctgctggacgagaacagcatgctgatccccatcgctgtgggtggtgccctggcggggctggtcctcatcgtcctcatcgcctacctcgtcggcaggaagaggagtcacgcaggctaccagactatctagtaaagatctttttccctctgccaaaaattatggggacatcatgaagccccttgagcatctgacttctggctaataaaggaaatttattttcattgcaatagtgtgttggaattttttgtgtctctcactcggaaggacataagggcggccgcggtacccgtgaggctccggtgcccgtcagtgggcagagcgcacatcgcccacagtccccgagaagttggggggaggggtcggcaattgaaccggtgcctagagaaggtggcgcggggtaaactgggaaagtgatgtcgtgtactggctccgcctttttcccgagggtgggggagaaccgtatataagtgcagtagtcgccgtgaacgttctttttcgcaacgggtttgccgccagaacacagtctagaggatccgccgccaccatgtacaggatgcaactcctgtcttgcattgcactaagtcttgcacttgtcacgaattcgataagcagcagccctgccaaggaccctcctattcagaggctgaggggcgccgtgacaaggtgcgaggacggacagctgttcatcagcagctacaagaacgagtatcagaccatggaggtgcagaacaacagcgtggtgatcaagtgcgacggcctgtacatcatctacctgaagggcagcttcttccaagaggtgaagatcgacctgcactttagggaggaccacaaccctatcagcatccctatgctgaacgacggaaggaggatcgtgttcaccgtggtggctagcctggccttcaaggacaaggtgtacctgaccgtgaacgcccctgacaccctgtgcgagcacctgcagatcaacgacggcgagctgatcgtggtgcagctgacccctggctactgcgcccctgagggcagctaccacagcaccgtgaaccaagtgcctctggatatcggaggcggaggaagcggaggcggaggaagccccagagggcccacaatcaagccctgtcctccatgcaaatgcccagcacctaacctcgagggtggaccatccgtcttcatcttccctccaaagatcaaggatgtactcatgatctccctgagccccatagtcacatgtgtggtggtggatgtgagcgaggatgacccagatgtccagatcagctggtttgtgaacaacgtggaagtacacacagctcagacacaaacccatagagaggattacaacagtactctccgggtggtcagtgccctccccatccagcaccaggactggatgagtggcaaggcgttcgcatgcgcggtcaacaacaaagacctcccagcgcccatcgagagaaccatctcaaaacccaaagggtcagtaagagctccacaggtatatgtcttgcctccaccagaagaagagatgactaagaaacaggtcactctgacctgcatggtcacagacttcatgcctgaagacatttacgtggagtggaccaacaacgggaaaacagagctaaactacaagaacactgaaccagtcctggactctgatggttcttacttcatgtacagcaagctgagagtggaaaagaagaactgggtggaaagaaatagctactcctgttcagtggtccacgagggtctgcacaatcaccacacgactaagagcttctcccggactccgggtaaa

SEQ ID NO: 242 - protein, 412 aa, synthetic construct
  REGION 1..412: note = IL-2 SP-OX40L extracellular domain Fc protein sequence
MYRMQLLSCIALSLALVTNSSSSPAKDPPIQRLRGAVTRCEDGQLFISSYKNEYQTMEVQNNSVVIKCDGLYIIYLKGSFFQEVKIDLHFREDHNPISIPMLNDGRRIVFTVVASLAFKDKVYLTVNAPDTLCEHLQINDGELIVVQLTPGYCAPEGSYHSTVNQVPLDIGGGGSGGGGSPRGPTIKPCPPCKCPAPNLEGGPSVFIFPPKIKDVLMISLSPIVTCVVVDVSEDDPDVQISWFVNNVEVHTAQTQTHREDYNSTLRVVSALPIQHQDWMSGKAFACAVNNKDLPAPIERTISKPKGSVRAPQVYVLPPPEEEMTKKQVTLTCMVTDFMPEDIYVEWTNNGKTELNYKNTEPVLDSDGSYFMYSKLRVEKKNWVERNSYSCSVVHEGLHNHHTTKSFSRTPGK

SEQ ID NO: 243 - protein, 392 aa, synthetic construct
  REGION 1..392: note = OX40L (Extracellular Domain +Fc Domain) Protein Sequence
SSSPAKDPPIQRLRGAVTRCEDGQLFISSYKNEYQTMEVQNNSVVIKCDGLYIIYLKGSFFQEVKIDLHFREDHNPISIPMLNDGRRIVFTVVASLAFKDKVYLTVNAPDTLCEHLQINDGELIVVQLTPGYCAPEGSYHSTVNQVPLDIGGGGSGGGGSPRGPTIKPCPPCKCPAPNLEGGPSVFIFPPKIKDVLMISLSPIVTCVVVDVSEDDPDVQISWFVNNVEVHTAQTQTHREDYNSTLRVVSALPIQHQDWMSGKAFACAVNNKDLPAPIERTISKPKGSVRAPQVYVLPPPEEEMTKKQVTLTCMVTDFMPEDIYVEWTNNGKTELNYKNTEPVLDSDGSYFMYSKLRVEKKNWVERNSYSCSVVHEGLHNHHTTKSFSRTPGK

SEQ ID NO: 244 - DNA, 1176 bp, synthetic construct
  misc_feature 1..1176: note = OX40L (Extracellular Domain +Fc Domain) DNA Sequence
  source 1..1176: mol_type = other DNA
agcagcagccctgccaaggaccctcctattcagaggctgaggggcgccgtgacaaggtgcgaggacggacagctgttcatcagcagctacaagaacgagtatcagaccatggaggtgcagaacaacagcgtggtgatcaagtgcgacggcctgtacatcatctacctgaagggcagcttcttccaagaggtgaagatcgacctgcactttagggaggaccacaaccctatcagcatccctatgctgaacgacggaaggaggatcgtgttcaccgtggtggctagcctggccttcaaggacaaggtgtacctgaccgtgaacgcccctgacaccctgtgcgagcacctgcagatcaacgacggcgagctgatcgtggtgcagctgacccctggctactgcgcccctgagggcagctaccacagcaccgtgaaccaagtgcctctggatatcggaggcggaggaagcggaggcggaggaagccccagagggcccacaatcaagccctgtcctccatgcaaatgcccagcacctaacctcgagggtggaccatccgtcttcatcttccctccaaagatcaaggatgtactcatgatctccctgagccccatagtcacatgtgtggtggtggatgtgagcgaggatgacccagatgtccagatcagctggtttgtgaacaacgtggaagtacacacagctcagacacaaacccatagagaggattacaacagtactctccgggtggtcagtgccctccccatccagcaccaggactggatgagtggcaaggcgttcgcatgcgcggtcaacaacaaagacctcccagcgcccatcgagagaaccatctcaaaacccaaagggtcagtaagagctccacaggtatatgtcttgcctccaccagaagaagagatgactaagaaacaggtcactctgacctgcatggtcacagacttcatgcctgaagacatttacgtggagtggaccaacaacgggaaaacagagctaaactacaagaacactgaaccagtcctggactctgatggttcttacttcatgtacagcaagctgagagtggaaaagaagaactgggtggaaagaaatagctactcctgttcagtggtccacgagggtctgcacaatcaccacacgactaagagcttctcccggactccgggtaaa

SEQ ID NO: 245 - DNA, 212 bp, synthetic construct; identical to SEQ ID NO: 124
  misc_feature 1..212: note = EF-1alpha core promoter
  source 1..212: mol_type = other DNA

SEQ ID NO: 246 - protein, 20 aa, Mus musculus
MYRMQLLSCIALSLALVTNS

SEQ ID NO: 247 - DNA, 60 bp, Mus musculus
  source 1..60: mol_type = genomic DNA
atgtacaggatgcaactcctgtcttgcattgcactaagtcttgcacttgtcacgaattcg

SEQ ID NO: 248 - protein, 20 aa, Homo sapiens
MYRMQLLSCIALSLALVTNS

SEQ ID NO: 249 - DNA, 60 bp, Homo sapiens
  source 1..60: mol_type = genomic DNA
atgtacaggatgcaactcctgtcttgcattgcactaagtcttgcacttgtcacaaacagt

SEQ ID NO: 250 - skipped

SEQ ID NO: 251 - DNA, 4825 bp, synthetic construct
  misc_feature 1..4825: note = HER2-LAMP-CD80; HER2 (Extracellular Domain) +LAMP +EF-1alpha +IL-2 SP +CD80 (Extracellular Domain +Fc Domain); DNA Sequence
  source 1..4825: mol_type = other DNA
atggcgccccgcagcgcccggcgacccctgctgctgctactgctgttgctgctgctcggcctcatgcattgtgcgtcagcagcaatgtttatggtgaaaaatggcaacgggaccgcgtgcataatggccaacttctctgctgccttctcagtgaactacgacaccaagagtggccctaagaacatgacccttgacctgccatcagatgccacagtggtgctcaaccgcagctcctgtggaaaagagaacacttctgaccccagtctcgtgattgcttttggaagaggacatacactcactctcaatttcacgagaaatgcaacacgttacagcgtccagctcatgagttttgtttataacttgtcagacacacaccttttccccaatgcgagctccaaagaaatcaagactgtggaatctataactgacatcagggcagatatagataaaaaatacagatgtgttagtggcacccaggtccacatgaacaacgtgaccgtaacgctccatgatgccaccatccaggcgtacctttccaacagcagcttcagccggggagagacacgctgtgaacaagacctcgagacacaagtctgcaccggcaccgacatgaagctgagactgcccgccagccccgaaacccatctggacatgctgcggcatctgtaccaaggctgtcaagtggtgcaaggcaatctggaactgacatatctgcctaccaacgcctctctgagctttctgcaagacatccaagaagtgcaaggctacgtcctcattgcccacaaccaagtccgacaagtgccactgcagcggctgagaatcgtgcggggcacccagctgttcgaggacaactatgctctggccgtgctggacaacggcgaccctctgaacaacaccacaccagtgactggcgcctctcccggcggactgagagaactgcagctgcgctctctgaccgagattctgaagggcggcgtgctgatccagcggaaccctcagctgtgctaccaagacaccattctgtggaaggacatcttccacaagaacaaccagctggctctgaccctcatcgacaccaacagaagccgggcttgccacccttgcagccccatgtgcaagggcagcagatgttggggcgagagcagcgaggactgccagtctctgaccagaaccgtgtgtgccggcggatgcgccagatgcaagggccctctgccaaccgattgctgccacgaacagtgcgccgctggctgtaccggccccaagcacagcgattgtctggcttgtctgcacttcaaccactccggcatctgcgagctgcactgcccagccctcgtgacatacaacaccgacacattcgagagcatgcccaaccccgagggcagatacacattcggcgccagctgtgtgaccgcttgcccctacaactatctgagcaccgacgtgggcagctgcaccctcgtgtgccctctgcacaatcaagaagtgaccgccgaggacggcacccagagatgcgagaagtgctccaagccttgcgccagagtgtgctacggactgggcatggaacatctgcgggaagtgcgggccgtgaccagcgccaatatccaagaatttgccggctgcaagaagattttcggcagtctggcctttctgcccgagagcttcgatggcgaccccgcctctaacacagcccctctgcagccagagcagctccaagtgttcgagacactggaagagatcaccggctatctgtacatcagcgcttggcccgactctctgcccgatctgagcgtgttccagaatctgcaagtcatcagaggccggattctgcacaacggcgcctattctctgacactgcaaggactgggaatcagctggctgggactgcggagtctgagagagctgggcagcggactggcactgatccaccacaacacccatctgtgcttcgtgcacaccgtgccttgggatcagctgttccggaatccccaccaagctctgctgcacaccgccaacagacccgaggatgagtgtgtgggcgaggggctggcttgccatcagctctgtgccagaggacactgttggggacccggccctacccagtgcgtgaactgctcccagtttctgcggggccaagaatgcgtggaagagtgcagagtgctccaaggactgccccgcgagtacgtgaacgccagacactgtctgccatgccaccccgagtgccagcctcagaatggcagcgtgacatgcttcggccccgaggccgatcagtgtgtggcttgcgctcactacaaggaccctcccttctgcgtggcccggtgtccttctggcgtgaaacccgatctgtcctacatgcctatctggaagttccccgacgaggaaggcgcttgtcagccttgccccatcaactgcacccacgaattcacctgcctgctggccagcatggggctgcagctgaacctcacctatgagaggaaggacaacacgacggtgacaaggcttctcaacatcaaccccaacaagacctcggccagcgggagctgcggcgcccacctggtgactctggagctgcacagcgagggcaccaccgtcctgctcttccagttcgggatgaatgcaagttctagccggtttttcctacaaggaatccagttgaatacaattcttcctgacgccagagaccctgcctttaaagctgccaacggctccctgcgagcgctgcaggccacagtcggcaattcctacaagtgcaacgcggaggagcacgtccgtgtcacgaaggcgttttcagtcaatatattcaaagtgtgggtccaggctttcaaggtggaaggtggccagtttggctctgtggaggagtgtctgctggacgagaacagcatgctgatccccatcgctgtgggtggtgccctggcggggctggtcctcatcgtcctcatcgcctacctcgtcggcaggaagaggagtcacgcaggctaccagactatctagtaaagatctttttccctctgccaaaaattatggggacatcatgaagccccttgagcatctgacttctggctaataaaggaaatttattttcattgcaatagtgtgttggaattttttgtgtctctcactcggaaggacataagggcggccgcggtacccgtgaggctccggtgcccgtcagtgggcagagcgcacatcgcccacagtccccgagaagttggggggaggggtcggcaattgaaccggtgcctagagaaggtggcgcggggtaaactgggaaagtgatgtcgtgtactggctccgcctttttcccgagggtgggggagaaccgtatataagtgcagtagtcgccgtgaacgttctttttcgcaacgggtttgccgccagaacacagtctagaggatccgccgccaccatgtacaggatgcaactcctgtcttgcattgcactaagtcttgcacttgtcacgaattcgatagtggacgagcagctgagcaagagcgtgaaggacaaggtgctgctgccttgtaggtacaacagccctcacgaggacgagagcgaggataggatctactggcagaagcacgacaaggtagtgctgagtgtgatagccggcaagctgaaggtgtggcctgagtacaagaataggaccctgtacgacaacaccacctacagcctgatcatcctgggcctggtgctgagcgataggggtacctacagctgcgtggtgcagaagaaggagaggggcacctacgaggtgaagcacctggccctggtgaagctgagcatcaaggccgacttcagcacccctaacatcaccgagagcggcaaccctagcgccgacaccaagaggatcacctgcttcgctagcggcggcttccctaagcctaggttcagctggctggagaacggaagggagctgcctggcataaacacgaccatatctcaagaccctgagagcgagctgtacaccatcagctctcagctggacttcaacaccacccgcaatcacaccatcaagtgcctgatcaagtacggcgacgcccacgtgagcgaggacttcacctgggagaagcctcctgaggaccctcctgacagcaagaacgatatcggaggcggaggaagcggaggcggaggaagccccagagggcccacaatcaagccctgtcctccatgcaaatgcccagcacctaacctcgagggtggaccatccgtcttcatcttccctccaaagatcaaggatgtactcatgatctccctgagccccatagtcacatgtgtggtggtggatgtgagcgaggatgacccagatgtccagatcagctggtttgtgaacaacgtggaagtacacacagctcagacacaaacccatagagaggattacaacagtactctccgggtggtcagtgccctccccatccagcaccaggactggatgagtggcaaggcgttcgcatgcgcggtcaacaacaaagacctcccagcgcccatcgagagaaccatctcaaaacccaaagggtcagtaagagctccacaggtatatgtcttgcctccaccagaagaagagatgactaagaaacaggtcactctgacctgcatggtcacagacttcatgcctgaagacatttacgtggagtggaccaacaacgggaaaacagagctaaactacaagaacactgaaccagtcctggactctgatggttcttacttcatgtacagcaagctgagagtggaaaagaagaactgggtggaaagaaatagctactcctgttcagtggtccacgagggtctgcacaatcaccacacgactaagagcttctcccggactccgggtaaa

SEQ ID NO: 252 - protein, 473 aa, synthetic construct
  REGION 1..473: note = IL-2 SP + CD80 extracellular domain + FC
MYRMQLLSCIALSLALVTNSVDEQLSKSVKDKVLLPCRYNSPHEDESEDRIYWQKHDKVVLSVIAGKLKVWPEYKNRTLYDNTTYSLIILGLVLSDRGTYSCVVQKKERGTYEVKHLALVKLSIKADFSTPNITESGNPSADTKRITCFASGGFPKPRFSWLENGRELPGINTTISQDPESELYTISSQLDFNTTRNHTIKCLIKYGDAHVSEDFTWEKPPEDPPDSKNDIGGGGSGGGGSPRGPTIKPCPPCKCPAPNLEGGPSVFIFPPKIKDVLMISLSPIVTCVVVDVSEDDPDVQISWFVNNVEVHTAQTQTHREDYNSTLRVVSALPIQHQDWMSGKAFACAVNNKDLPAPIERTISKPKGSVRAPQVYVLPPPEEEMTKKQVTLTCMVTDFMPEDIYVEWTNNGKTELNYKNTEPVLDSDGSYFMYSKLRVEKKNWVERNSYSCSVVHEGLHNHHTTKSFSRTPGK

SEQ ID NO: 253 - protein, 453 aa, synthetic construct; identical to SEQ ID NO: 219
  REGION 1..453: note = CD80 (Extracellular Domain +Fc Domain) Protein Sequence

SEQ ID NO: 254 - protein, 817 aa, Merkel cell polyomavirus
  REGION 1..817: note = MISC_FEATURE - ACCESSION YP_009111421
MDLVLNRKEREALCKLLEIAPNCYGNIPLMKAAFKRSCLKHHPDKGGNPVIMMELNTLWSKFQQNIHKLRSDFSMFDEVDEAPIYGTTKFKEWWRSGGFSFGKAYEYGPNPHGTNSRSRKPSSNASRGAPSGSSPPHSQSSSSGYGSFSASQASDSQSRGPDIPPEHHEEPTSSSGSSSREETTNSGRESSTPNGTSVPRNSSRTDGTWEDLFCDESLSSPEPPSSSEEPEEPPSSRSSPRQPPSSSAEEASSSQFTDEEYRSSSFTTPKTPPPFSRKRKFGGSRSSASSASSASFTSTPPKPKKNRETPVPTDFPIDLSDYLSHAVYSNKTVSCFAIYTTSDKAIELYDKIEKFKVDFKSRHACELGCILLFITLSKHRVSAIKNFCSTFCTISFLICKGVNKMPEMYNNLCKPPYKLLQENKPLLNYEFQEKEKEASCNWNLVAEFACEYELDDHFIILAHYLDFAKPFPCQKCENRSRLKPHKAHEAHHSNAKLFYESKSQKTICQQAADTVLAKRRLEMLEMTRTEMLCKKFKKHLERLRDLDTIDLLYYMGGVAWYCCLFEEFEKKLQKIIQLLTENIPKYRNIWFKGPINSGKTSFAAALIDLLEGKALNINCPSDKLPFELGCALDKFMVVFEDVKGQNSLNKDLQPGQGINNLDNLRDHLDGAVAVSLEKKHVNKKHQIFPPCIVTANDYFIPKTLIARFSYTLHFSPKANLRDSLDQNMEIRKRRILQSGTTLLLCLIWCLPDTTFKPCLQEEIKNWKQILQSEISYGKFCQMIENVEAGQDPLLNILIEEEGPEETEETQDSGTFSQ

SEQ ID NO: 255 - protein, 327 aa, Merkel cell polyomavirus
  SITE 220: note = MISC_FEATURE - Xaa can be any amino acid, preferably where Xaa is an alanine.
MDLVLNRKEREALCKLLEIAPNCYGNIPLMKAAFKRSCLKHHPDKGGNPVIMMELNTLWSKFQQNIHKLRSDFSMFDEVDEAPIYGTTKFKEWWRSGGFSFGKAYEYGPNPHGTNSRSRKPSSNASRGAPSGSSPPHSQSSSSGYGSFSASQASDSQSRGPDIPPEHHEEPTSSSGSSSREETTNSGRESSTPNGTSVPRNSSRTDGTWEDLFCDESLSXPEPPSSSEEPEEPPSSRSSPRQPPSSSAEEASSSQFTDEEYRSSSFTTPKTPPPFSRKRKFGGSRSSASSASSASFTSTPPKPKKNRETPVPTDFPIDLSDYLSHAV

SEQ ID NO: 256 - protein, 327 aa, Merkel Cell Polyomavirus
  REGION 1..327: note = MISC_FEATURE - Sequence is identical to SEQ ID NO:115, but amino acid 220 is replaced with an alanine.
MDLVLNRKEREALCKLLEIAPNCYGNIPLMKAAFKRSCLKHHPDKGGNPVIMMELNTLWSKFQQNIHKLRSDFSMFDEVDEAPIYGTTKFKEWWRSGGFSFGKAYEYGPNPHGTNSRSRKPSSNASRGAPSGSSPPHSQSSSSGYGSFSASQASDSQSRGPDIPPEHHEEPTSSSGSSSREETTNSGRESSTPNGTSVPRNSSRTDGTWEDLFCDESLSAPEPPSSSEEPEEPPSSRSSPRQPPSSSAEEASSSQFTDEEYRSSSFTTPKTPPPFSRKRKFGGSRSSASSASSASFTSTPPKPKKNRETPVPTDFPIDLSDYLSHAV

SEQ ID NO: 257 - protein, 186 aa, Merkel Cell Polyomavirus
MDLVLNRKEREALCKLLEIAPNCYGNIPLMKAAFKRSCLKHHPDKGGNPVIMMELNTLWSKFQQNIHKLRSDFSMFDEVSTKFPWEEYGTLKDYMQSGYNARFCRGPGCMLKQLRDSKCACISCKLSRQHCSLKTLKQKNCLTWGECFCYQCFILWFGFPPTWESFDWWQKTLEETDYCLLHLHLF

SEQ ID NO: 258 - protein, 369 aa, synthetic construct
  REGION 1..369: note = MAGE-A10__Homo_sapiens__A0A024RC14
MPRAPKRQRCMPEEDLQSQSETQGLEGAQAPLAVEEDASSSTSTSSSFPSSFPSSSSSSSSSCYPLIPSTPEEVSADDETPNPPQSAQIACSSPSVVASLPLDQSDEGSSSQKEESPSTLQVLPDSESLPRSEIDEKVTDLVQFLLFKYQMKEPITKAEILESVIKNYEDHFPLLFSEASECMLLVFGIDVKEVDPTGHSFVLVTSLGLTYDGMLSDVQSMPKTGILILILSIIFIEGYCTPEEVIWEALNMMGLYDGMEHLIYGEPRKLLTQDWVQENYLEYRQVPGSDPARYEFLWGPRAHAEIRKMSLLKFLAKVNGSDPRSFPLWYEEALKDEEERAQDRIATTDDTTAMASASSSATGSFSYPE

SEQ ID NO: 259 - protein, 314 aa, synthetic construct
  REGION 1..314: note = MAGE-A12__Homo_sapiens__P43365
MPLEQRSQHCKPEEGLEAQGEALGLVGAQAPATEEQETASSSSTLVEVTLREVPAAESPSPPHSPQGASTLPTTINYTLWSQSDEGSSNEEQEGPSTFPDLETSFQVALSRKMAELVHFLLLKYRAREPFTKAEMLGSVIRNFQDFFPVIFSKASEYLQLVFGIEVVEVVRIGHLYILVTCLGLSYDGLLGDNQIVPKTGLLIIVLAIIAKEGDCAPEEKIWEELSVLEASDGREDSVFAHPRKLLTQDLVQENYLEYRQVPGSDPACYEFLWGPRALVETSYVKVLHHLLKISGGPHISYPPLHEWAFREGEE

SEQ ID NO: 260 - protein, 309 aa, synthetic construct
  REGION 1..309: note = MAGE-A1__Homo_sapiens__P43355
MSLEQRSLHCKPEEALEAQQEALGLVCVQAATSSSSPLVLGTLEEVPTAGSTDPPQSPQGASAFPTTINFTRQRQPSEGSSSREEEGPSTSCILESLFRAVITKKVADLVGFLLLKYRAREPVTKAEMLESVIKNYKHCFPEIFGKASESLQLVFGIDVKEADPTGHSYVLVTCLGLSYDGLLGDNQIMPKTGFLIIVLVMIAMEGGHAPEEEIWEELSVMEVYDGREHSAYGEPRKLLTQDLVQEKYLEYRQVPDSDPARYEFLWGPRALAETSYVKVLEYVIKVSARVRFFFPSLREAALREEEEGV

SEQ ID NO: 261 - protein, 314 aa, synthetic construct
  REGION 1..314: note = MAGE-A2__Homo_sapiens__P43356
MPLEQRSQHCKPEEGLEARGEALGLVGAQAPATEEQQTASSSSTLVEVTLGEVPAADSPSPPHSPQGASSFSTTINYTLWRQSDEGSSNQEEEGPRMFPDLESEFQAAISRKMVELVHFLLLKYRAREPVTKAEMLESVLRNCQDFFPVIFSKASEYLQLVFGIEVVEVVPISHLYILVTCLGLSYDGLLGDNQVMPKTGLLIIVLAIIAIEGDCAPEEKIWEELSMLEVFEGREDSVFAHPRKLLMQDLVQENYLEYRQVPGSDPACYEFLWGPRALIETSYVKVLHHTLKIGGEPHISYPPLHERALREGEE

SEQ ID NO: 262 - protein, 314 aa, synthetic construct
  REGION 1..314: note = MAGE-A3__Homo_sapiens__P43357
MPLEQRSQHCKPEEGLEARGEALGLVGAQAPATEEQEAASSSSTLVEVTLGEVPAAESPDPPQSPQGASSLPTTMNYPLWSQSYEDSSNQEEEGPSTFPDLESEFQAALSRKVAELVHFLLLKYRAREPVTKAEMLGSVVGNWQYFFPVIFSKASSSLQLVFGIELMEVDPIGHLYIFATCLGLSYDGLLGDNQIMPKAGLLIIVLAIIAREGDCAPEEKIWEELSVLEVFEGREDSILGDPKKLLTQHFVQENYLEYRQVPGSDPACYEFLWGPRALVETSYVKVLHHMVKISGGPHISYPPLHEWVLREGEE

SEQ ID NO: 263 - protein, 317 aa, synthetic construct
  REGION 1..317: note = MAGE-A4__Homo_sapiens__A0A024RC12
MSSEQKSQHCKPEEGVEAQEEALGLVGAQAPTTEEQEAAVSSSSPLVPGTLEEVPAAESAGPPQSPQGASALPTTISFTCWRQPNEGSSSQEEEGPSTSPDAESLFREALSNKVDELAHFLLRKYRAKELVTKAEMLERVIKNYKRCFPVIFGKASESLKMIFGIDVKEVDPASNTYTLVTCLGLSYDGLLGNNQIFPKTGLLIIVLGTIAMEGDSASEEEIWEELGVMGVYDGREHTVYGEPRKLLTQDWVQENYLEYRQVPGSNPARYEFLWGPRALAETSYVKVLEHVVRVNARVRIAYPSLREAALLEEEEGV

SEQ ID NO: 264 - protein, 317 aa, synthetic construct; identical to SEQ ID NO: 263
  REGION 1..317: note = MAGE-A4__Homo_sapiens__P43358

SEQ ID NO: 265 - protein, 317 aa, synthetic construct
  REGION 1..317: note = MAGE-A4__Homo_sapiens__Q1RN33
MSSEQKSQHCKPEEGVEAQEEALGLVGAQAPTTEEQEAAVSSSSPLVPGTLEEVPAAESAGPPQSPQGASALPTTISFTCWRQPNEGSSSQEEEGPSTSPDAESLFREALSNKVDELAHFLLRKYRAKELVTKAEMLERVIKNYKRCFPVIFGKASESLKMIFGIDVKEVDPTSNTYTLVTCLGLSYDGLLGNNQIFPKTGLLIIVLGTIAMEGDSASEEEIWEELGVMGVYDGREHTVYGEPRKLLTQDWVQENYLEYRQVPGSNPARYEFLWGPRALAETSYVKVLEHVVRVNARVRIAYPSLREAALLEEEEGV

SEQ ID NO: 266 - protein, 314 aa, synthetic construct [sequence omitted]

SEQ ID NO: 267 - protein, 314 aa, synthetic construct
  REGION 1..314: note = MAGE-A6__Homo_sapiens__P43360
MPLEQRSQHCKPEEGLEARGEALGLVGAQAPATEEQEAASSSSTLVEVTLGEVPAAESPDPPQSPQGASSLPTTMNYPLWSQSYEDSSNQEEEGPSTFPDLESEFQAALSRKVAKLVHFLLLKYRAREPVTKAEMLGSVVGNWQYFFPVIFSKASDSLQLVFGIELMEVDPIGHVYIFATCLGLSYDGLLGDNQIMPKTGFLIIILAIIAKEGDCAPEEKIWEELSVLEVFEGREDSIFGDPKKLLTQYFVQENYLEYRQVPGSDPACYEFLWGPRALIETSYVKVLHHMVKISGGPRISYPLLHEWALREGEE

SEQ ID NO: 268 - protein, 314 aa, synthetic construct [sequence omitted]

SEQ ID NO: 269 - protein, 315 aa, synthetic construct
  REGION 1..315: note = MAGE-A9__Homo_sapiens__P43362
MSLEQRSPHCKPDEDLEAQGEDLGLMGAQEPTGEEEETTSSSDSKEEEVSAAGSSSPPQSPQGGASSSISVYYTLWSQFDEGSSSQEEEEPSSSVDPAQLEFMFQEALKLKVAELVHFLLHKYRVKEPVTKAEMLESVIKNYKRYFPVIFGKASEFMQVIFGTDVKEVDPAGHSYILVTALGLSCDSMLGDGHSMPKAALLIIVLGVILTKDNCAPEEVIWEALSVMGVYVGKEHMFYGEPRKLLTQDWVQENYLEYRQVPGSDPAHYEFLWGSKAHAETSYEKVINYLVMLNAREPICYPSLYEEVLGEEQEGV

SEQ ID NO: 270 - protein, 347 aa, synthetic construct
  REGION 1..347: note = MAGE-B10__Homo_sapiens__Q96LZ2
MPRGQKSKLRAREKRRQARGGLEDLIDALDILEEEEESPPSASACLKDVFQSSLDGASNNPHGLREAQSTSTSATAASHTRHPEGVNDQMEERPICTQDLEATDSFPRGPVDEKVIILVHYLLYKYQMKEPITKADMLRNVTQMSKSQFPVILSRASEHLELIFGLDLKEVEPNKHIYVLVNKLDLGCDAKLSDETGVPKTGLLMTVLGIIFTNGNCVAEEEVWKVFNTMGLYDGIEHFMFGEPRKLLTKDLVKENYLEYQQVPNSDPPRYQFLWGPRAHAETSKMKVLEFLAKVNDTAPSEFSNWYTEALQDEEERARARVAAKARVSATAGARSKVKSSKSSQLQ

SEQ ID NO: 271 - protein, 324 aa, synthetic construct
  REGION 1..324: note = MAGE-B16__Homo_sapiens__A2A368
MSQDQESPRCTHDQHLQTFSETQSLEVAQVSKALEKTLLSSSHPLVPGKLKEAPAAKAESPLEVPQSFCSSSIAVTTTSSSESDEASSNQEEEDSPSSSEDTSDPRNVPADALDQKVAFLVNFMLHKCQMKKPITKADMLKIIIKDDESHFSEILLRASEHLEMIFGLDVVEVDPTTHCYGLFIKLGLTYDGMLSGEKGVPKTGLLIIVLGVIFMKGNRATEEEVWEVLNLTGVYSGKKHFIFGEPRMLITKDFVKEKYLEYQQVANSDPARYEFLWGPRAKAETSKMKVLEFVAKVHGSYPHSFPSQYAEALKEEEERARARI

SEQ ID NO: 272 - protein, 336 aa, synthetic construct
  REGION 1..336: note = MAGE-B17__Homo_sapiens__A8MXT2
MPRGQASKRRAREKRRQARGEDQCLGGAQATAAEKEKLPSSSSPACQSPPQSFPNAGIPQESQRASYPSSPASAVSLTSSDEGAKGQKGESPNSFHGPSSSESTGRDLLNTKTGELVQFLLNKYIRKEPITREAMLKVINRKYKQHFPEILRRSTENVEVVFGLYLKEMDPSRQSYVLVGKLDFPNQGSLSDGGGFPLSGLLMVLLSTIFMHGNRATEEEMWECLNALGMYKGRKHFIYGEPQELVTKDLVREGYLEYQQVPSSDPPRYEFLWGPRARAETSKMKVLEFVAKLNDTVASTYKSRYEEALREEEEQARARAVARDSARARASRSFQP

SEQ ID NO: 273 - protein, 347 aa, synthetic construct [sequence omitted]

SEQ ID NO: 274 - protein, 319 aa, synthetic construct
  REGION 1..319: note = MAGE-B2__Homo_sapiens__O15479
MPRGQKSKLRAREKRRKARDETRGLNVPQVTEAEEEEAPCCSSSVSGGAASSSPAAGIPQEPQRAPTTAAAAAAGVSSTKSKKGAKSHQGEKNASSSQASTSTKSPSEDPLTRKSGSLVQFLLYKYKIKKSVTKGEMLKIVGKRFREHFPEILKKASEGLSVVFGLELNKVNPNGHTYTFIDKVDLTDEESLLSSWDFPRRKLLMPLLGVIFLNGNSATEEEIWEFLNMLGVYDGEEHSVFGEPWKLITKDLVQEKYLEYKQVPSSDPPRFQFLWGPRAYAETSKMKVLEFLAKVNGTTPCAFPTHYEEALKDEEKAGV

SEQ ID NO: 275 - protein, 346 aa, synthetic construct
  REGION 1..346: note = MAGE-B3__Homo_sapiens__O15480
MPRGQKSTLHAREKRQQTRGQTQDHQGAQITATNKKKVSFSSPLILGATIQKKSAGRSRSALKKPQRALSTTTSVDVSYKKSYKGANSKIEKKQSFSQGLSSTVQSRTDPLIMKTNMLVQFLMEMYKMKKPIMKADMLKIVQKSHKNCFPEILKKASFNMEVVFGVDLKKVDSTKDSYVLVSKMDLPNNGTVTRGRGFPKTGLLLNLLGVIFMKGNCATEEKIWEFLNKMRIYDGKKHFIFGEPRKLITQDLVKLKYLEYRQVPNSNPARYEFLWGPRAHAETSKMKVLEFWAKVNKTVPSAFQFWYEEALRDEEERVQAAAMLNDGSSAMGRKCSKAKASSSSHA

SEQ ID NO: 276 - protein, 346 aa, synthetic construct
  REGION 1..346: note = MAGE-B4__Homo_sapiens__O15481
MPRGQKSKLRAREKRQRTRGQTQDLKVGQPTAAEKEESPSSSSSVLRDTASSSLAFGIPQEPQREPPTTSAAAAMSCTGSDKGDESQDEENASSSQASTSTERSLKDSLTRKTKMLVQFLLYKYKMKEPTTKAEMLKIISKKYKEHFPEIFRKVSQRTELVFGLALKEVNPTTHSYILVSMLGPNDGNQSSAWTLPRNGLLMPLLSVIFLNGNCAREEEIWEFLNMLGIYDGKRHLIFGEPRKLITQDLVQEKYLEYQQVPNSDPPRYQFLWGPRAHAETSKMKVLEFLAKVNDTTPNNFPLLYEEALRDEEERAGARPRVAARRGTTAMTSAYSRATSSSSSQPM

SEQ ID NO: 277 - protein, 275 aa, synthetic construct
  REGION 1..275: note = MAGE-B5__Homo_sapiens__Q9BZ81
MTSAGVFNAGSDERANSRDEEYPCSSEVSPSTESSCSNFINIKVGLLEQFLLYKFKMKQRILKEDMLKIVNPRYQNQFAEIHRRASEHIEVVFAVDLKEVNPTCHLYDLVSKLKLPNNGRIHVGKVLPKTGLLMTFLVVIFLKGNCANKEDTWKFLDMMQIYDGKKYYIYGEPRKLITQDFVRLTYLEYHQVPCSYPAHYQFLWGPRAYTETSKMKVLEYLAKVNDIAPGAFSSQYEEALQDEEESPSQRCSRNWHYCSGQDCLRAKFSSFSQPY

SEQ ID NO: 278 - protein, 407 aa, synthetic construct
  REGION 1..407: note = MAGE-B6__Homo_sapiens__Q8N7X4
MPRGHKSKLRTCEKRQETNGQPQGLTGPQATAEKQEESHSSSSSSRACLGDCRRSSDASIPQESQGVSPTGSPDAVVSYSKSDVAANGQDEKSPSTSRDASVPQESQGASPTGSPDAGVSGSKYDVAANGQDEKSPSTSHDVSVPQESQGASPTGSPDAGVSGSKYDVAAEGEDEESVSASQKAIIFKRLSKDAVKKKACTLAQFLQKKFEKKESILKADMLKCVRREYKPYFPQILNRTSQHLVVAFGVELKEMDSSGESYTLVSKLGLPSEGILSGDNALPKSGLLMSLLVVIFMNGNCATEEEVWEFLGLLGIYDGILHSIYGDARKIITEDLVQDKYVVYRQVCNSDPPCYEFLWGPRAYAETTKMRVLRVLADSSNTSPGLYPHLYEDALIDEVERALRLRA

SEQ ID NO: 279 - protein, 1142 aa, synthetic construct
  REGION 1..1142: note = MAGE-C1__Homo_sapiens__O60732
MGDKDMPTAGMPSLLQSSSESPQSCPEGEDSQSPLQIPQSSPESDDTLYPLQSPQSRSEGEDSSDPLQRPPEGKDSQSPLQIPQSSPEGDDTQSPLQNSQSSPEGKDSLSPLEISQSPPEGEDVQSPLQNPASSFFSSALLSIFQSSPESTQSPFEGFPQSVLQIPVSAASSSTLVSIFQSSPESTQSPFEGFPQSPLQIPVSRSFSSTLLSIFQSSPERTQSTFEGFAQSPLQIPVSPSSSSTLLSLFQSFSERTQSTFEGFAQSSLQIPVSPSFSSTLVSLFQSSPERTQSTFEGFPQSPLQIPVSSSSSSTLLSLFQSSPERTHSTFEGFPQSLLQIPMTSSFSSTLLSIFQSSPESAQSTFEGFPQSPLQIPGSPSFSSTLLSLFQSSPERTHSTFEGFPQSPLQIPMTSSFSSTLLSILQSSPESAQSAFEGFPQSPLQIPVSSSFSYTLLSLFQSSPERTHSTFEGFPQSPLQIPVSSSSSSSTLLSLFQSSPECTQSTFEGFPQSPLQIPQSPPEGENTHSPLQIVPSLPEWEDSLSPHYFPQSPPQGEDSLSPHYFPQSPPQGEDSLSPHYFPQSPQGEDSLSPHYFPQSPPQGEDSMSPLYFPQSPLQGEEFQSSLQSPVSICSSSTPSSLPQSFPESSQSPPEGPVQSPLHSPQSPPEGMHSQSPLQSPESAPEGEDSLSPLQIPQSPLEGEDSLSSLHFPQSPPEWEDSLSPLHFPQFPPQGEDFQSSLQSPVSICSSSTSLSLPQSFPESPQSPPEGPAQSPLQRPVSSFFSYTLASLLQSSHESPQSPPEGPAQSPLQSPVSSFPSSTSSSLSQSSPVSSFPSSTSSSLSKSSPESPLQSPVISFSSSTSLSPFSEESSSPVDEYTSSSDTLLESDSLTDSESLIESEPLFTYTLDEKVDELARFLLLKYQVKQPITKAEMLTNVISRYTGYFPVIFRKAREFIEILFGISLREVDPDDSYVFVNTLDLTSEGCLSDEQGMSQNRLLILILSIIFIKGTYASEEVIWDVLSGIGVRAGREHFAFGEPRELLTKVWVQEHYLEYREVPNSSPPRYEFLWGPRAHSEVIKRKVVEFLAMLKNTVPITFPSSYKDALKDVEERAQAIIDTTDDSTATESASSSVMSPSFSSE

SEQ ID NO: 280 - protein, 373 aa, synthetic construct
  REGION 1..373: note = MAGE-C2__Homo_sapiens__Q9UBF1
MPPVPGVPFRNVDNDSPTSVELEDWVDAQHPTDEEEEEASSASSTLYLVFSPSSFSTSSSLILGGPEEEEVPSGVIPNLTESIPSSPPQGPPQGPSQSPLSSCCSSFSWSSFSEESSSQKGEDTGTCQGLPDSESSFTYTLDEKVAELVEFLLLKYEAEEPVTEAEMLMIVIKYKDYFPVILKRAREFMELLFGLALIEVGPDHFCVFANTVGLTDEGSDDEGMPENSLLIIILSVIFIKGNCASEEVIWEVLNAVGVYAGREHFVYGEPRELLTKVWVQGHYLEYREVPHSSPPYYEFLWGPRAHSESIKKKVLEFLAKLNNTVPSSFPSWYKDALKDVEERVQATIDTADDATVMASESLSVMSSNVSFSE

SEQ ID NO: 281 - protein, 643 aa, synthetic construct
  REGION 1..643: note = MAGE-C3__Homo_sapiens__Q8TD91
MLLPCHWVLDATFSDGSLGQWVKNTCATYALSPVVLPPQPQPRKKATDKDYSAFHLGHLREVRLFLRGGTSDQRMDSLVLCPTYFKLWRTLSGSPGLQLSDLHFGSQPEGKFSLRRAVSVKQREEPQDWPLNEKRTLWKDSDLPTWRRGTGYTLSLPAVSPGKRLWGEKAGSLPESEPLFTYTLDEKVDKLVQFLLLKYQAKEPLTRAEMQMNVINTYTGYFPMIFRKAREFIEILFGISLTEVDPDHFYVFVNTLDLTCEGSLSDEQGMPQNRLLILILSVIFIKGNCASEEVIWEVLNAIGPWSALAGFADVLSRLALWESEGPEAFCEESGLRSAEGSVLDLANPQGLAGHRQEDGRRGLTEASPQQKKGGEDEDMPAAGMPPLPQSPPEIPPQGPPKISPQGPPQSPPQSPLDSCSSPLLWTRLDEESSSEEEDTATWHALPESESLPRYALDEKVAELVQFLLLKYQTKEPVTKAEMLTTVIKKYKDYFPMIFGKAHEFIELIFGIALTDMDPDNHSYFFEDTLDLTYEGSLIDDQGMPKNCLLILILSMIFIKGSCVPEEVIWEVLSAIGPIQRPAREVLEFLSKLSSIIPSAFPSWYMDALKDMEDRAQAIIDTTDDATAMASASPSVMSTNFCPE

SEQ ID NO: 282 - protein, 778 aa, synthetic construct
  REGION 1..778: note = MAGE-D1__Homo_sapiens__Q9Y5V3
MAQKMDCGAGLLGFQAEASVEDSALLMQTLMEAIQISEAPPTNQATAAASPQSSQPPTANEMADIQVSAAAARPKSAFKVQNATTKGPNGVYDFSQAHNAKDVPNTQPKAAFKSQNATPKGPNAAYDFSQAATTGELAANKSEMAFKAQNATTKVGPNATYNFSQSLNANDLANSRPKTPFKAWNDTTKAPTADTQTQNVNQAKMATSQADIETDPGISEPDGATAQTSADGSQAQNLESRTIIRGKRTRKINNLNVEENSSGDQRRAPLAAGTWRSAPVPVTTQNPPGAPPNVLWQTPLAWQNPSGWQNQTARQTPPARQSPPARQTPPAWQNPVAWQNPVIWPNPVIWQNPVIWPNPIVWPGPVVWPNPLAWQNPPGWQTPPGWQTPPGWQGPPDWQGPPDWPLPPDWPLPPDWPLPTDWPLPPDWIPADWPIPPDWQNLRPSPNLRPSPNSRASQNPGAAQPRDVALLQERANKLVKYLMLKDYTKVPIKRSEMLRDIIREYTDVYPEIIERACFVLEKKFGIQLKEIDKEEHLYILISTPESLAGILGTTKDTPKLGLLLVILGVIFMNGNRASEAVLWEALRKMGLRPGVRHPLLGDLRKLLTYEFVKQKYLDYRRVPNSNPPEYEFLWGLRSYHETSKMKVLRFIAEVQKRDPRDWTAQFMEAADEALDALDAAAAEAEARAEARTRMGIGDEAVSGPWSWDDIEFELLTWDEEGDFGDPWSRIPFTFWARYHQNARSRFPQTFAGPIIGPGGTASANFAANFGAIGFFWVE

SEQ ID NO: 283 - protein, 606 aa, synthetic construct
  REGION 1..606: note = MAGE-D2__Homo_sapiens__Q9UNF1
MSDTSESGAGLTRFQAEASEKDSSSMMQTLLTVTQNVEVPETPKASKALEVSEDVKVSKASGVSKATEVSKTPEAREAPATQASSTTQLTDTQVLAAENKSLAADTKKQNADPQAVTMPATETKKVSHVADTKVNTKAQETEAAPSQAPADEPEPESAAAQSQENQDTRPKVKAKKARKVKHLDGEEDGSSDQSQASGTTGGRRVSKALMASMARRASRGPIAFWARRASRTRLAAWARRALLSLRSPKARRGKARRRAAKLQSSQEPEAPPPRDVALLQGRANDLVKYLLAKDQTKIPIKRSDMLKDIIKEYTDVYPEIIERAGYSLEKVFGIQLKEIDKNDHLYILLSTLEPTDAGILGTTKDSPKLGLLMVLLSIIFMNGNRSSEAVIWEVLRKLGLRPGIHHSLFGDVKKLITDEFVKQKYLDYARVPNSNPPEYEFFWGLRSYYETSKMKVLKFACKVQKKDPKEWAAQYREAMEADLKAAAEAAAEAKARAEIRARMGIGLGSENAAGPCNWDEADIGPWAKARIQAGAEAKAKAQESGSASTGASTSTNNSASASASTSGGFSAGASLTATLTFGLFAGLGGAGASTSGSSGACGFSYK

SEQ ID NO: 284 - protein, 741 aa, synthetic construct
  REGION 1..741: note = MAGE-D4__Homo_sapiens__Q96JG8
MAEGSFSVQSESYSVEDMDEGSDEVGEEEMVEGNDYEEFGAFGGYGTLTSFDIHILRAFGSLGPGLRILSNEPWELENPVLAQTLVEALQLDPETLANETAARAANVARAAASNRAARAAAAAARTAFSQVVASHRVATPQVSGEDTQPTTYAAEAQGPTPEPPLASPQTSQMLVTSKMAAPEAPATSAQSQTGSPAQEAATEGPSSACAFSQAPCAREVDANRPSTAFLGQNDVFDFTQPAGVSGMAFPRPKRPAPAQEAATEGPSAASGVPQTGPGREVAATRPKTTKSGKALAKTRWVEPQNVVAAAAAKAKMATSIPEPEGAAAATAQHSAEPWARMGGKRTKKSKHLDDEYESSEEERETPAVPPTWRASQPSLTVRAQLAPRPPMAPRSQIPSRHVLCLPPRNVTLLQERANKLVKYLMIKDYKKIPIKRADMLKDVIREYDEHFPEIIERATYTLEKKFGIHLKEIDKEEHLYILVCTRDSSARLLGKTKDTPRLSLLLVILGVIFMNGNRASEAVLWEALRKMGLRPGVRHPFLGDLRKLITDDFVKQKYLEYKKIPNSNPPEYEFLWGLRARHETSKMRVLRFIAQNQNRDPREWKAHFLEAVDDAFKTMDVDMAEEHARAQMRAQMNIGDEALIGRWSWDDIQVELLTWDEDGDFGDAWARIPFAFWARYHQYILNSNRANRRATWRAGVSSGTNGGASTSVLDGPSTSSTIRTRNAARAGASFFSWIQHR

SEQ ID NO: 285 - protein, 373 aa, synthetic construct [sequence omitted]

SEQ ID NO: 286 - protein, 957 aa, synthetic construct
  REGION 1..957: note = MAGE-E1_(MAGE1)__Homo_sapiens__Q9HCI5
MSLVSQNSRRRRRRVAKATAHNSSWGEMQAPNAPGLPADVPGSDVPQGPSDSQILQGLCASEGPSTSVLPTSAEGPSTFVPPTISEASSASGQPTISEGPGTSVLPTPSEGLSTSGPPTISKGLCTSVTLAASEGRNTSRPPTSSEEPSTSVPPTASEVPSTSLPPTPGEGTSTSVPPTAYEGPSTSVVPTPDEGPSTSVLPTPGEGPGTSVPLAATEGLSTSVQATPDEGPSTSVPPTATEGLSTPVPPTRDEGPSTSVPATPGEGPSTSVLPAASDGQSISLVPTRGKGSSTSVPPTATEGLSTSVQPTAGEGSSTSVPPTPGGGLSTSVPPTATEELSTSVPPTPGEGPSTSVLPIPGEGLSTSVPPTASDGSDTSVPPTPGEGASTLVQPTAPDGPGSSVLPNPGEGPSTLFSSSASVDRNPSKCSLVLPSPRVTKASVDSDSEGPKGAEGPIEFEVLRDCESPNSISIMGLNTSRVAITLKPQDPMEQNVAELLQFLLVKDQSKYPIRESEMREYIVKEYRNQFPEILRRAAAHLECIFRFELRELDPEAHTYILLNKLGPVPFEGLEESPNGPKMGLLMMILGQIFLNGNQAKEAEIWEMLWRMGVQRERRLSIFGNPKRLLSVEFVWQRYLDYRPVTDCKPVEYEFFWGPRSHLETTKMKILKFMAKIYNKDPMDWPEKYNEALEEDAARAFAEGWQALPHFRRPFFEEAAAEVPSPDSEVSSYSSKYAPHSWPESRLESKARKLVQLFLLMDSTKLPIPKKGILYYIGRECSKVFPDLLNRAARTLNHVYGTELVVLDPRNHSYTLYNRREMEETEEIVDSPNRPGNNFLMQVLSFIFIMGNHARESAVWAFLRGLGVQAGRKHVITCRYLSQRYIDSLRVPDSDPVQYEFVWGPRARLETSKMKALRYVARIHRKEPQDWPQQYREAMEDEANRADVGHRQIFVHNFR

SEQ ID NO: 287 - protein, 523 aa, synthetic construct
  REGION 1..523: note = MAGE-E2__Homo_sapiens__Q8TD90
MSLVSQNARHCSAEITADYGDGRGEIQATNASGSPTSMLVVDAPQCPQAPINSQCVNTSQAVQDPNDLEVLIDEQSRRLGALRVHDPLEDRSIALVNFMRMKSQTEGSIQQSEMLEFLREYSDQFPEILRRASAHLDQVFGLNLRVIDPQADTYNLVSKRGFQITDRIAESLDMPKASLLALVLGHILLNGNRAREASIWDLLLKVDMWDKPQRINNLFGNTRNLLTTDFVCMRFLEYWPVYGTNPLEFEFLWGSRAHREITKMEALKFVSDAHDEEPWSWPEEYNKALEGDKTKERSLTAGLEFWSEDTMNDKANDLVQLAISVTEEMLPIHQDELLAHTGKEFEDVFPNILNRATLILDMFYGLSLIEVDTSEHIYLLVQQPESEEEQVMLESLGRPTQEYVMPILGLIFLMGNRVKEANVWNLLRRFSVDVGRKHSITRKLMRQRYLECRPLSYSNPVEYELLWGPRAHHETIKMKVLEYMARLYRKRPQNWPEQYREAVEDEEARAKSEATIMFFLDPT

SEQ ID NO: 288 - protein, 307 aa, synthetic construct
  REGION 1..307: note = MAGE-F1__Homo_sapiens__Q9HAY2
MLQTPESRGLPVPQAEGEKDGGHDGETRAPTASQERPKEELGAGREEGAAEPALTRKGARALAAKALARRRAYRRLNRTVAELVQFLLVKDKKKSPITRSEMVKYVIGDLKILFPDIIARAAEHLRYVFGFELKQFDRKHHTYILINKLKPLEEEEEEDLGGDGPRLGLLMMILGLIYMRGNSAREAQVWEMLRRLGVQPSKYHFLFGYPKRLIMEDFVQQRYLSYRRVPHTNPPEYEFSWGPRSNLEISKMEVLGFVAKLHKKEPQHWPVQYREALADEADRARAKARAEASMRARASARAGIHLW

SEQ ID NO: 289 - protein, 219 aa, synthetic construct
  REGION 1..219: note = MAGE-H1__Homo_sapiens__Q9H213
MPRGRKSRRRRNARAAEENRNNRKIQASEASETPMAASVVASTPEDDLSGPEEDPSTPEEASTTPEEASSTAQAQKPSVPRSNFQGTKKSLLMSILALIFIMGNSAKEALVWKVLGKLGMQPGRQHSIFGDPKKIVTEEFVRRGYLIYKPVPRSSPVEYEFFWGPRAHVESSKLKVMHFVARVRNRCSKDWPCNYDWDSDDDAEVEAILNSGARGYSAP

SEQ ID NO: 290 - protein, 1249 aa, synthetic construct
  REGION 1..1249: note = MAGEL2__Homo_sapiens__Q9UJ55
MSQLSKNLGDSSPPAEAPKPPVYSRPTVLMRAPPASSRAPPVPWDPPPIDLQASLAAWQAPQPAWEAPQGQLPAPVVPMTQPPALGGPIVPAPPLGGPMGKPPTPGVLMVHPPPPGAPMAQPPTPGVLMVHPSAPGAPMAHPPPPGTPMSHPPPPGTPMAHPPPPGTPMAHPPPPGTPMVHPPPPGTPMAHPPPPGTPMAHPPPPGTPMAHPPPPGTPMAHPPPPGTPMAQPPAPGVLMAQPLTPGVLMVQPAAPGAPMVQPPPAAMMTQPQPSGAPMAKPPGPGVLMIHPPGARAPMTQPPASGAPMAQPAAPPAQPMAPPAQPMASWAPQAQPLILQIQSQVIRAPPQVPQGPQAPPAQLATPPGWQATSPGWQATQQGWQATPLTWQTTQVTWQAPAVTWQVPPPMRQGPPPIRPGPPPIRPGPPPVRQAPPLIRQAPPVIRQAPPVIRQAPPVIRQAPAVIRQAPPVIRQAPPVIRQAPPVIRQAPPLIRQAPPPIRPAPQVLATQPPLWQALPPPPPLRQAPQARLPAPQVQAAPQVPTAPPATQVPAAPPAGPQVPQPVLPAPLSAPLSAPQAVHCPSIIWQAPKGQPPVPHEIPTSMEFQEVQQTQALAWQAQKAPTHIWQPLPAQEAQRQAPPLVQLEQPFQGAPPSQKAVQIQLPPQQAQASGPQAEVPTLPLQPSWQAPPAVLQAQPGPPVAAANFPLGSAKSLMTPSGECRASSIDRRGSSKERRTSSKERRAPSKDRMIFAATFCAPKAVSAARAHLPAAWKNLPATPETFAPSSSVFPATSQFQPASLNAFKGPSAASETPKSLPYALQDPFACVEALPAVPWVPQPNMNASKASQAVPTFLMATAAAPQATATTQEASKTSVEPPRRSGKATRKKKHLEAQEDSRGHTLAFHDWQGPRPWENLNLSDWEVQSPIQVSGDWEHPNTPRGLSGWEGPSTSRILSGWEGPSASWALSAWEGPSTSRALGLSESPGSSLPVVVSEVASVSPGSSATQDNSKVEAQPLSPLDERANALVQFLLVKDQAKVPVQRSEMVKVILREYKDECLDIINRANNKLECAFGYQLKEIDTKNHAYIIINKLGYHTGNLVASYLDRPKFGLLMVVLSLIFMKGNCVREDLIFNFLFKLGLDVRETNGLFGNTKKLITEVFVRQKYLEYRRIPYTEPAEYEFLWGPRAFLETSKMLVLRFLAKLHKKDPQSWPFHYLEALAECEWEDTDEDEPDTGDSAHGPTSRPPPR

SEQ ID NO: 291 - protein, 561 aa, synthetic construct
  REGION 1..561: note = Synthetic Construct
MESRGRRCPEMISVLGPISGHVLKAVFSRGDTPVLPHETRLLQTGIHVRVSQPSLILVSQYTPDSTPCHRGDNQLQVQHTYFTGSEVENVSVNVHNPTGRSICPSQEPMSIYVYALPLKMLNIPSINVHHYPSAAERKHRHLPVADAVIHASGKQMWQARLTVSGLAWTRQQNQWKEPDVYYTSAFVFPTKDVALRHVVCAHELVCSMENTRATKMQVIGDQYVKVYLESFCEDVPSGKLFMHVTLGSDVEEDLTMTRNPQPFMRPHERNGFTVLCPKNMIIKPGKISHIMLDVAFTSHEHFGLLCPKSIPGLSISGNLLMNGQQIFLEVQAIRETVELRQYDPVAALFFFDIDLLLQRGPQYSEHPTFTSQYRIQGKLEYRHTWDRHDEGAAQGDDDVWTSGSDSDEELVTTERKTPRVTGGGAMAGASTSAGRKRKSASSATACTSGVMTRGRLKAESTVAPEEDTDEDSDNEIHNPAVFTWPPWQAGILARNLVPMVATVQGQNLKYQEFFWDANDIYRIFAELEGVWQPAAQPKRRRHRQDALPGPCIASTPKKHRG

SEQ ID NO: 292 - protein, 146 aa, synthetic construct
  REGION 1..146: note = Synthetic Construct
LLQTGIHVRVSQPSLGPGPGALPLKMLNIPSINVHGPGPGDQYVKVYLESFCEDVGPGPGIIKPGKISHIMLDVAFTSHGPGPGPQYSEHPTFTSQYRIQGKLGPGPGPPWQAGILARNLVPMVGPGPGKYQEFFWDANDIYRIFA

SEQ ID NO: 293 - protein, 146 aa, synthetic construct
  REGION 1..146: note = Synthetic Construct
LLQTGIHVRVSQPSLPMGLPALPLKMLNIPSINVHPMGLPDQYVKVYLESFCEDVPMGLPIIKPGKISHIMLDVAFTSHPMGLPPQYSEHPTFTSQYRIQGKLPMGLPPPWQAGILARNLVPMVPMGLPKYQEFFWDANDIYRIFA

SEQ ID NO: 294 - protein, 906 aa, Human herpesvirus 5
  REGION 1..906: note = MISC_FEATURE - Strain AD169
MESRIWCLVVCVNLCIVCLGAAVSSSSTSHATSSTHNGSHTSRTTSAQTRSVYSQHVTSSEAVSHRANETIYNTTLKYGDVVGVNTTKYPYRVCSMAQGTDLIRFERNIICTSMKPINEDLDEGIMVVYKRNIVAHTFKVRVYQKVLTFRRSYAYIYTTYLLGSNTEYVAPPMWEIHHINKFAQCYSSYSRVIGGTVFVAYHRDSYENKTMQLIPDDYSNTHSTRYVTVKDQWHSRGSTWLYRETCNLNCMLTITTARSKYPYHFFATSTGDVVYISPFYNGTNRNASYFGENADKFFIFPNYTIVSDFGRPNAAPETHRLVAFLERADSVISWDIQDEKNVTCQLTFWEASERTIRSEAEDSYHFSSAKMTATFLSKKQEVNMSDSALDCVRDEAINKLQQIFNTSYNQTYEKYGNVSVFETSGGLVVFWQGIKQKSLVELERLANRSSLNITHRTRRSTSDNNTTHLSSMESVHNLVYAQLQFTYDTLRGYINRALAQIAEAWCVDQRRTLEVFKELSKINPSAILSAIYNKPIAARFMGDVLGLASCVTINQTSVKVLRDMNVKESPGRCYSRPVVIFNFANSSYVQYGQLGEDNEILLGNHRTEECQLPSLKIFIAGNSAYEYVDYLFKRMIDLSSISTVDSMIALDIDPLENTDFRVLELYSQKELRSSNVFDLEEIMREFNSYKQRVKYVEDKVVDPLPPYLKGLDDLMSGLGAAGKAVGVAIGAVGGAVASVVEGVATFLKNPFGAFTIILVAIAVVIITYLIYTRQRRLCTQPLQNLFPYLVSADGTTVTSGSTKDTSLQAPPSYEESVYNSGRKGPGPPSSDASTAAPPYTNEQAYQMLLALARLDAEQRAQQNGTDSLDGQTGTQDKGQKPNLLDRLRHRKNGYRHLKDSDEEENV

SEQ ID NO: 295 - protein, 863 aa, Human herpesvirus 5
  REGION 1..863: note = MISC_FEATURE - Strain AD169
VSSSSTSHATSSTHNGSHTSRTTSAQTRSVYSQHVTSSEAVSHRANETIYNTTLKYGDVVGVNTTKYPYRVCSMAQGTDLIRFERNIICTSMKPINEDLDEGIMVVYKRNIVAHTFKVRVYQKVLTFRRSYAYIYTTYLLGSNTEYVAPPMWEIHHINKFAQCYSSYSRVIGGTVFVAYHRDSYENKTMQLIPDDYSNTHSTRYVTVKDQWHSRGSTWLYRETCNLNCMLTITTARSKYPYHFFATSTGDVVYISPFYNGTNRNASYFGENADKFFIFPNYTIVSDFGRPNAAPETHRLVAFLERADSVISWDIQDEKNVTCQLTFWEASERTIRSEAEDSYHFSSAKMTATFLSKKQEVNMSDSALDCVRDEAINKLQQIFNTSYNQTYEKYGNVSVFETSGGLVVFWQGIKQKSLVELERLANRSSLNITHRTRRSTSDNNTTHLSSMESVHNLVYAQLQFTYDTLRGYINRALAQIAEAWCVDQRRTLEVFKELSKINPSAILSAIYNKPIAARFMGDVLGLASCVTINQTSVKVLRDMNVKESPGRCYSRPVVIFNFANSSYVQYGQLGEDNEILLGNHRTEECQLPSLKIFIAGNSAYEYVDYLFKRMIDLSSISTVDSMIALDIDPLENTDFRVLELYSQKELRSSNVFDLEEIMREFNSYKQRVKYVEDKVVDPLPPYLKGLDDLMSGLGAAGKAVGVAIGAVGGAVASVVEGVATFLKNPTRQRRLCTQPLQNLFPYLVSADGTTVTSGSTKDTSLQAPPSYEESVYNSGRKGPGPPSSDASTAAPPYTNEQAYQMLLALARLDAEQRAQQNGTDSLDGQTGTQDKGQKPNLLDRLRHRKNGYRHLKDSDEEENV

SEQ ID NO: 296 - protein, 79 aa, synthetic construct
  REGION 1..79: note = Synthetic Construct
TTSAQTRSVYSQHVTGPGPGQLIPDDYSNTHSTRYVGPGPGVSVFETSGGLVVFWQGPGPGNSAYEYVDYLFKRMIDLS

SEQ ID NO: 297 - protein, 79 aa, synthetic construct
  REGION 1..79: note = Synthetic Construct
TTSAQTRSVYSQHVTPMGLPQLIPDDYSNTHSTRYVPMGLPVSVFETSGGLVVFWQPMGLPNSAYEYVDYLFKRMIDLS

SEQ ID NO: 298 - protein, 491 aa, Human herpesvirus 5
  REGION 1..491: note = MISC_FEATURE - Strain AD169
MESSAKRKMDPDNPDEGPSSKVPRPETPVTKATTFLQTMLRKEVNSQLSLGDPLFPELAEESLKTFEQVTEDCNENPEKDVLAELVKQIKVRVDMVRHRIKEHMLKKYTQTEEKFTGAFNMMGGCLQNALDILDKVHEPFEEMKCIGLTMQSMYENYIVPEDKREMWMACIKELHDVSKGAANKLGGALQAKARAKKDELRRKMMYMCYRNIEFFTKNSAFPKTTNGCSQAMAALQNLPQCSPDEIMAYAQKIFKILDEERDKVLTHIDHIFMDILTTCVETMCNEYKVTSDACMMTMYGGISLLSEFCRVLCCYVLEETSVMLAKRPLITKPEVISVMKRRIEEICMKVFAQYILGADPLRVCSPSVDDLRAIAEESDEEEAIVAYTLATAGVSSSDSLVSPPESPVPATIPLSSVIVAENSDQEESEQSDEEEEEGAQEEREDTVSVKSEPVSEIEEVAPEEEEDGAEEPTASGGKSTHPMVTRSKADQ

SEQ ID NO: 299 - protein, 156 aa, synthetic construct
  REGION 1..156: note = Synthetic Construct
VLAELVKQIKVRVDMVRHRIKEHMLKKYTQGPGPGIVPEDKREMWMACIKELHGPGPGKDELRRKMMYMCYRNIEFFTKNSAFPKTTGPGPGSVMKRRIEEICMKVFAQYIGPGPGAIAEESDEEEAIVAYGPGPGVKSEPVSEIEEVAPEEEEDG

SEQ ID NO: 300 - protein, 156 aa, synthetic construct
  REGION 1..156: note = Synthetic Construct
VLAELVKQIKVRVDMVRHRIKEHMLKKYTQPMGLPIVPEDKREMWMACIKELHPMGLPKDELRRKMMYMCYRNIEFFTKNSAFPKTTPMGLPSVMKRRIEEICMKVFAQYIPMGLPAIAEESDEEEAIVAYPMGLPVKSEPVSEIEEVAPEEEEDG

SEQ ID NO: 301 - protein, 79 aa, Human betaherpesvirus 5
MLSVMVSSSLVLIVFFLGASEEAKPATTTTIKNTKPQCRPEDYATRLQDLRVTFHRVKPTLVGHVGTVYCDGLSFPRVG

SEQ ID NO: 302 - protein, 54 aa, synthetic construct
  REGION 1..54: note = Synthetic Construct
ATTTTIKNTKPQCRPEDYATRLQDLRVTFHRVKPTLVGHVGTVYCDGLSFPRVG

SEQ ID NO: 303 - protein, 354 aa, Human betaherpesvirus 5
MTPTTTTAELTTEFDYDEDATPCVFTDVLNQSKPVTLFLYGVVFLFGSIGNFLVIFTITWRRRIQCSGDVYFINLAAADLLFVCTLPLWMQYLLDHNSLASVPCTLLTACFYVAMFASLCFITEIALDRYYAIVYMRYRPVKQACLFSIFWWIFAVIIAIPHFMVVTKKDNQCMTDYDYLEVSYPIILNVELMLGAFVIPLSVISYCYYRISRIVAVSQSRHKGRIVRVLIAVVLVFIIFWLPYHLTLFVDTLKLLKWISSSCEFERSLKRALILTESLAFCHCCLNPLLYVFVGTKFRQELHCLLAEFRQRLFSRDVSWYHSMSFSRRSSPSRRETSSDTLSDEVCRVSQIIP

SEQ ID NO: 304 - protein, 191 aa, synthetic construct
  REGION 1..191: note = Synthetic Construct
MTPTTTTAELTTEFDYDEDATPCVFTDVLNQSKPVTTWRRRIQCSGDDHNSLEIALDRYYAIVYMRYRPVKQTKKDNQCMTDYDYLEVSYPRISRIVAVSQSRHKGRIVRDTLKLLKWISSSCEFERSLKRGTKFRQELHCLLAEFRQRLFSRDVSWYHSMSFSRRSSPSRRETSSDTLSDEVCRVSQIIP

SEQ ID NO: 305 - protein, 327 aa, Homo sapiens
MLPRVGCPALPLPPPPLLPLLPLLLLLLGASGGGGGARAEVLFRCPPCTPERLAACGPPPVAPPAAVAAVAGGARMPCAELVREPGCGCCSVCARLEGEACGVYTPRCGQGLRCYPHPGSELPLQALVMGEGTCEKRRDAEYGASPEQVADNGDDHSEGGLVENHVDSTMNMLGGGGSAGRKPLKSGMKELAVFREKVTEQHRQMGKGGKHHLGLEEPKKLRPPPARTPCQQELDQVLERISTMRLPDERGPLEHLYSLHIPNCDKHGLYNLKQCKMSLNQRGECWCVNPNTGKLIQGAPTIRGDPECHLFYNEQQEARGVHTQRMQ

SEQ ID NO: 306 - protein, 175 aa, Human cytomegalovirus
  REGION 1..175: note = MISC_FEATURE - Strain AD169
MLSVMVSSSLVLIVFFLGASEEAKPATTTIKNTKPQCRPEDYATRLQDLRVTFHRVKPTLQREDDYSVWLDGTVVKGCWGCSVMDWLLRRYLEIVFPAGDHVYPGLKTELHSMRSTLESIYKDMRQCPLLGCGDKSVISRLSQEAERKSDNGTRKGLSELDTLFSRLEEYLHSRK

SEQ ID NO: 307 - protein, 150 aa, synthetic construct
  REGION 1..150: note = Synthetic Construct
ATTTIKNTKPQCRPEDYATRLQDLRVTFHRVKPTLQREDDYSVWLDGTVVKGCWGCSVMDWLLRRYLEIVFPAGDHVYPGLKTELHSMRSTLESIYKDMRQCPLLGCGDKSVISRLSQEAERKSDNGTRKGLSELDTLFSRLEEYLHSRK

SEQ ID NO: 308 - protein, 176 aa, Human cytomegalovirus
  REGION 1..176: note = MISC_FEATURE - Strain Merlin
MKPLVMLICFGVILLQLGVTKVCQHNEVQLGNECCPPCGLGQRVTKVCTERTSVTCTPCPNGTYVSGLYNCTDCTQCNVTQVMIRNCTSTNNTVCAPKNHTYFSTPGVQHHKQRQQNHTAHITVKQGKSGRHTLAWLSLFIFLVGIILLILYLIAAYRSERCQQCCSIGKIFYRTL

SEQ ID NO: 309 - protein, 135 aa, synthetic construct
  REGION 1..135: note = Synthetic Construct
KVCQHNEVQLGNECCPPCGLGQRVTKVCTERTSVTCTPCPNGTYVSGLYNCTDCTQCNVTQVMIRNCTSTNNTVCAPKNHTYFSTPGVQHHKQRQQNHTAHITVKQGKSGRHTAAYRSERCQQCCSIGKIFYRTL

SEQ ID NO: 310 - protein, 338 aa, Human cytomegalovirus
  REGION 1..338: note = MISC_FEATURE - Strain Merlin
MCRRESLRTLPWLFWVLLSCPRLLEYSSSSFPFATADIAEKMWAENYETTSPAPVLVAEGEQVTIPCTVMTHSWPMVSIRARFCRSHDGSDELILDAVKGHRLMNGLQYRLPYATWNFSQLHLGQIFSLTFNVSTDTAGMYECVLRNYSHGLIMQRFVILTQLETLSRPDEPCCTPALGRYSLGDQIWSPTPWRLRNHDCGMYRGFQRNYFYIGRADAEDCWKPACPDEEPDRCWTVIQRYRLPGDCYRSQPHPPKFLPVTPAPPADIDTGMSPWATRGIAAFLGFWSIFTVCFLCYLCYLQCCGRWCPTPGRGRRGGEGYRRLPTYDSYPGVKKMKR

SEQ ID NO: 311 - protein, 281 aa, synthetic construct
  REGION 1..281: note = Synthetic Construct
DIAEKMWAENYETTSPAPVLVAEGEQVTIPCTVMTHSWPMVSIRARFCRSHDGSDELILDAVKGHRLMNGLQYRLPYATWNFSQLHLGQIFSLTFNVSTDTAGMYECVLRNYSHGLIMQRFVILTQLETLSRPDEPCCTPALGRYSLGDQIWSPTPWRLRNHDCGMYRGFQRNYFYIGRADAEDCWKPACPDEEPDRCWTVIQRYRLPGDCYRSQPHPPKFLPVTPAPPADIDTGMSPWATRYLQCCGRWCPTPGRGRRGGEGYRRLPTYDSYPGVKKMKR

SEQ ID NO: 312 - protein, 215 aa, Human cytomegalovirus
  REGION 1..215: note = MISC_FEATURE - Strain AD169
MNLVMLILALWAPVAGSMPELSLTLFDEPPPLVETEPLPPLSDVSEYRVEYSEARCVLRSGGRLEALWTLRGNLSVPTPTPRVYYQTLEGYADRVPTPVEDVSESLVAKRYWLRDYRVPQRTKLVLFYFSPCHQCQTYYVECEPRCLVPWVPLWSSLEDIERLLFEDRRLMAYYALTIKSAQYTLMMVAVIQVFWGLYVKGWLHRHFPWMFSDQW

SEQ ID NO: 313 - protein, 178 aa, synthetic construct
  REGION 1..178: note = Synthetic Construct
MPELSLTLFDEPPPLVETEPLPPLSDVSEYRVEYSEARCVLRSGGRLEALWTLRGNLSVPTPTPRVYYQTLEGYADRVPTPVEDVSESLVAKRYWLRDYRVPQRTKLVLFYFSPCHQCQTYYVECEPRCLVPWVPLWSSLEDIERLLFEDRRLMAYYALTIKSAQYHRHFPWMFSDQW

SEQ ID NO: 314 - protein, 742 aa, Human cytomegalovirus
MRPGLPSYLIVLAVCLLSHLLSPRYGAEAVSEPLDKAFHLLLNTYGRPIRFLRENATQCTYNSSLRNSTVVRENAISFNFFQSYNQYYVFHMPRCLFAGPLAEQFLNQVDLTETLERYQQRLNTYALVSKDLASYRSFSQQLKAQDSLGEQPTTVPPPIDLSIPHVWMPPQTTPHGWTESHTTSGLHRPHFNQTCILFDGHDLLFSTVTPCLHQGFYLIDELRYVKITLTEDFFVVTVSIDDDTPMLLIFGHLPRVLFKAPYQRDNFILRQTEKHELLVLVKKDQLNRHSYLKDPDFLDAALDFNYLDLSALLRNSFHRYAVDVLKSGRCQMLDRRTVEMAFAYALALFAAARQEEAGAQVSVPRALDRQAALLQIQEFMITCLSQTPPRTTLLLYPTAVDLAKRALWTPNQITDITSLVRLVYILSKQNQQHLIPQWALRQIADFALKLHKTHLASFLSAFARQELYLMGSLVHSMLVHTTERREIFIVETGLCSLAELSHFTQLLAHPHHEYLSDLYTPCSSSGRRDHSLERLTRLFPDATVPTTVPTALSILSTMQPSTLETFPDLFCLPLGESFSALTVSEHVSYVVTNQYLIKGISYPVSTTVVGQSLIITQTDSQSKCELTRNMHTTHSITAALNISLENCAFCQSALLEYDDTQGVINIMYMHDSDDVLFALDPYNEVVVSSPRTHYLMLLKNGTVLEVTDVVVDATDSRLLMMSVYALSAIIGIYLLYRMLKTC

SEQ ID NO: 315 - protein, 694 aa, Human cytomegalovirus
VSEPLDKAFHLLLNTYGRPIRFLRENATQCTYNSSLRNSTVVRENAISFNFFQSYNQYYVFHMPRCLFAGPLAEQFLNQVDLTETLERYQQRLNTYALVSKDLASYRSFSQQLKAQDSLGEQPTTVPPPIDLSIPHVWMPPQTTPHGWTESHTTSGLHRPHFNQTCILFDGHDLLFSTVTPCLHQGFYLIDELRYVKITLTEDFFVVTVSIDDDTPMLLIFGHLPRVLFKAPYQRDNFILRQTEKHELLVLVKKDQLNRHSYLKDPDFLDAALDFNYLDLSALLRNSFHRYAVDVLKSGRCQMLDRRTVEMAFAYALALFAAARQEEAGAQVSVPRALDRQAALLQIQEFMITCLSQTPPRTTLLLYPTAVDLAKRALWTPNQITDITSLVRLVYILSKQNQQHLIPQWALRQIADFALKLHKTHLASFLSAFARQELYLMGSLVHSMLVHTTERREIFIVETGLCSLAELSHFTQLLAHPHHEYLSDLYTPCSSSGRRDHSLERLTRLFPDATVPTTVPTALSILSTMQPSTLETFPDLFCLPLGESFSALTVSEHVSYVVTNQYLIKGISYPVSTTVVGQSLIITQTDSQSKCELTRNMHTTHSITAALNISLENCAFCQSALLEYDDTQGVINIMYMHDSDDVLFALDPYNEVVVSSPRTHYLMLLKNGTVLEVTDVVVDATDSRRMLKTC

SEQ ID NO: 316 - protein, 120 aa, synthetic construct
  REGION 1..120: note = Synthetic Construct
TYNSSLRNSTVVRENAISFNFFQSYNQYYVFHMPRGPGPGDLTETLERYQQRLNTYALVSKDLASYRSFSGPGPGSHTTSGLHRPHFNQTCILFDGPGPGQLNRHSYLKDPDFLDAALDF

SEQ ID NO: 317 - protein, 120 aa, synthetic construct
  REGION 1..120: note = Synthetic Construct
TYNSSLRNSTVVRENAISFNFFQSYNQYYVFHMPRPMGLPDLTETLERYQQRLNTYALVSKDLASYRSFSPMGLPSHTTSGLHRPHFNQTCILFDPMGLPQLNRHSYLKDPDFLDAALDF

SEQ ID NO: 318 - protein, 579 aa, Human cytomegalovirus
  REGION 1..579: note = MISC_FEATURE - Strain Towne
MESSAKRKMDPDNPDEGPSSKVPRPETPVTKATTFLQTMLRKEVNSQLSLGDPLFPELAEESLKTFERVTEDCNENPEKDVLAELGDILAQAVNHAGIDSSSTGPTLTTHSCSVSSAPLNKPTPTSVAVTNTPLPGASATPELSPRKKPRKTTRPFKVIIKPPVPPAPIMLPLIKQEDIKPEPDFTIQYRNKIIDTAGCIVISDSEEEQGEEVETRGATASSPSTGSGTPRVTSPTHPLSQMNHPPLPDPLGRPDEDSSSSSSSCSSASDSESESEEMKCSSGGGASVTSSHHGRGGFGGAASSSLLSCGHQSSGGASTGPRKKKSKRISELDNEKVRNIMKDKNTPFCTPNVQTRRGRVKIDEVSRMFRNTNRSLEYKNLPFTIPSMHQVLDEAIKACKTMQVNNKGIQIIYTRNHEVKSEVDAVRCRLGTMCNLALSTPFLMEHTMPVTHPPEVAQRTADACNEGVKAAWSLKELHTHQLCPRSSDYRNMIIHAATPVDLLGALNLCLPLMQKFPKQVMVRIFSTNQGGFMLPIYETAAKAYAVGQFEQPTETPPEDLDTLSLAIEAAIQDLRNKSQ

SEQ ID NO: 319 - protein, 60 aa, synthetic construct
  REGION 1..60: note = Synthetic Construct
RRGRVKIDEVSRMFRGPGPGGIQIIYTRNHEVKSEGPGPGLSTPFLMEHTMPVTHPPEVA

SEQ ID NO: 320 - protein, 60 aa, synthetic construct
  REGION 1..60: note = Synthetic Construct
RRGRVKIDEVSRMFRPMGLPGIQIIYTRNHEVKSEPMGLPLSTPFLMEHTMPVTHPPEVA

SEQ ID NO: 321 - protein, 1132 aa, Homo sapiens
MPRAPRCRAVRSLLRSHYREVLPLATFVRRLGPQGWRLVQRGDPAAFRALVAQCLVCVPWDARPPPAAPSFRQVSCLKELVARVLQRLCERGAKNVLAFGFALLDGARGGPPEAFTTSVRSYLPNTVTDALRGSGAWGLLLRRVGDDVLVHLLARCALFVLVAPSCAYQVCGPPLYQLGAATQARPPPHASGPRRRLGCERAWNHSVREAGVPLGLPAPGARRRGGSASRSLPLPKRPRRGAAPEPERTPVGQGSWAHPGRTRGPSDRGFCVVSPARPAEEATSLEGALSGTRHSHPSVGRQHHAGPPSTSRPPRPWDTPCPPVYAETKHFLYSSGDKEQLRPSFLLSSLRPSLTGARRLVETIFLGSRPWMPGTPRRLPRLPQRYWQMRPLFLELLGNHAQCPYGVLLKTHCPLRAAVTPAAGVCAREKPQGSVAAPEEEDTDPRRLVQLLRQHSSPWQVYGFVRACLRRLVPPGLWGSRHNERRFLRNTKKFISLGKHAKLSLQELTWKMSVRDCAWLRRSPGVGCVPAAEHRLREEILAKFLHWLMSVYVVELLRSFFYVTETTFQKNRLFFYRKSVWSKLQSIGIRQHLKRVQLRELSEAEVRQHREARPALLTSRLRFIPKPDGLRPIVNMDYVVGARTFRREKRAERLTSRVKALFSVLNYERARRPGLLGASVLGLDDIHRAWRTFVLRVRAQDPPPELYFVKVDVTGAYDTIPQDRLTEVIASIIKPQNTYCVRRYAVVQKAAHGHVRKAFKSHVSTLTDLQPYMRQFVAHLQETSPLRDAVVIEQSSSLNEASSGLFDVFLRFMCHHAVRIRGKSYVQCQGIPQGSILSTLLCSLCYGDMENKLFAGIRRDGLLLRLVDDFLLVTPHLTHAKTFLRTLVRGVPEYGCVVNLRKTVVNFPVEDEALGGTAFVQMPAHGLFPWCGLLLDTRTLEVQSDYSSYARTSIRASLTFNRGFKAGRNMRRKLFGVLRLKCHSLFLDLQVNSLQTVCTNIYKILLLQAYRFHACVLQLPFHQQVWKNPTFFLRVISDTASLCYSILKAKNAGMSLGAKGAAGPLPSEAVQWLCHQAFLLKLTRHRVTYVPLLGSLRTAQTQLSRKLPGTTLTALEAAANPALPSDFKTILD

SEQ ID NO: 322 - protein, 965 aa, Homo sapiens
YQVCGPPLYQLGAATQARPPPHASGPRRRLGCERAWNHSVREAGVPLGLPAPGARRRGGSASRSLPLPKRPRRGAAPEPERTPVGQGSWAHPGRTRGPSDRGFCVVSPARPAEEATSLEGALSGTRHSHPSVGRQHHAGPPSTSRPPRPWDTPCPPVYAETKHFLYSSGDKEQLRPSFLLSSLRPSLTGARRLVETIFLGSRPWMPGTPRRLPRLPQRYWQMRPLFLELLGNHAQCPYGVLLKTHCPLRAAVTPAAGVCAREKPQGSVAAPEEEDTDPRRLVQLLRQHSSPWQVYGFVRACLRRLVPPGLWGSRHNERRFLRNTKKFISLGKHAKLSLQELTWKMSVRDCAWLRRSPGVGCVPAAEHRLREEILAKFLHWLMSVYVVELLRSFFYVTETTFQKNRLFFYRKSVWSKLQSIGIRQHLKRVQLRELSEAEVRQHREARPALLTSRLRFIPKPDGLRPIVNMDYVVGARTFRREKRAERLTSRVKALFSVLNYERARRPGLLGASVLGLDDIHRAWRTFVLRVRAQDPPPELYFVKVDVTGAYDTIPQDRLTEVIASIIKPQNTYCVRRYAVVQKAAHGHVRKAFKSHVSTLTDLQPYMRQFVAHLQETSPLRDAVVIEQSSSLNEASSGLFDVFLRFMCHHAVRIRGKSYVQCQGIPQGSILSTLLCSLCYGDMENKLFAGIRRDGLLLRLVDDFLLVTPHLTHAKTFLRTLVRGVPEYGCVVNLRKTVVNFPVEDEALGGTAFVQMPAHGLFPWCGLLLDTRTLEVQSDYSSYARTSIRASLTFNRGFKAGRNMRRKLFGVLRLKCHSLFLDLQVNSLQTVCTNIYKILLLQAYRFHACVLQLPFHQQVWKNPTFFLRVISDTASLCYSILKAKNAGMSLGAKGAAGPLPSEAVQWLCHQAFLLKLTRHRVTYVPLLGSLRTAQTQLSRKLPGTTLTALEAAANPALPSDFKTILD

SEQ ID NO: 323 - protein, 1065 aa, Homo sapiens
MPRAPRCRAVRSLLRSHYREVLPLATFVRRLGPQGWRLVQRGDPAAFRALVAQCLVCVPWDARPPPAAPSFRQVSCLKELVARVLQRLCERGAKNVLAFGFALLDGARGGPPEAFTTSVRSYLPNTVTDALRGSGAWGLLLRRVGDDGPPLYQLGAATQARPPPHASGPRRRLGCERAWNHSVREAGVPLGLPAPGARRRGGSASRSLPLPKRPRRGAAPEPERTPVGQGSWAHPGRTRGPSDRGFCVVSPARPAEEATSLEGALSGTRHSHPSVGRQHHAGPPSTSRPPRPWDTPCPPVYAETKHFLYSSGDKEQLRPSFLLSSLRPSLTGARRLVETIFLGSRPWMPGTPRRLPRLPQRYWQMRPLFLELLGNHAQCPYGVLLKTHCPLRAAVTPAAGVCAREKPQGSVAAPEEEDTDPRRLVQLLRQHSSPWQVYGFVRACLRRLVPPGLWGSRHNERRFLRNTKKFISLGKHAKLSLQELTWKMSVRDCAWLRRSPGVGCVPAAEHRLREEILAKFLHWLMSVYVVELLRSFFYVTETTFQKNRLFFYRKSVWSKLQSIGIRQHLKRVQLRELSEAEVRQHREARPALLTSRLRFIPKPDGLRPIVNMDYVVGARTFRREKRAERLTSRVKALFSVLNYERARRPGLLGASVLGLDDIHRAWRTFVLRVRAQDPPPELYFVKVAITGAYDTIPQDRLTEVIASIIKPQNTYCVRRYAVVQKAAHGHVRKAFKSHVSTLTDLQPYMRQFVAHLQETSPLRDAVVIEQSSSLNEASSGLFDVFLRFMCHHAVRIRGKSYVQENKLFAGIRRDGLLLRLVDDFLLVTPHLTHAKTFLRTLVRGVPEYGCVVNLRKTVVNFPVEDEALDTRTLEVQSDYSSYARTSIRASLTFNRGFKAGRNMRRKLFGVLRLKCHSLFLDLQVNSLQTVCTNIYKILLLQAYRFHACVLQLPFHQQVWKNPTFFLRVISDTASLCYSILKAKNAGMSLGAKGAAGPLPSEAVQWLCHQAFLLKLTRHRVTYVPLLGSLRTAQTQLSRKLPGTTLTALEAAANPALPSDFKTILD

SEQ ID NO: 324 - protein, 142 aa, Pongo abelii
MGAPTLPPAWQPFLKDHRISTFKNWPFLEGCACTPERMAEAGFIHCPTENEPDLAQCFFCFKELEGWEPDDDPIEEHKKHSSGCAFLSVKKQFEELTLGEFLKLDRERAKNKIAKETNNKKKEFEETAKKVRRAIEQLAAMD

SEQ ID NO: 325 - protein, 452 aa, Clostridium tetani
MKNLDCWVDNEEDIDVILKKSTILNLDINNDIISDISGFNSSVITYPDAQLVPGINGKAIHLVNNESSEVIVHKAMDIEYNDMFNNFTVSFWLRVPKVSASHLEQYGTNEYSIISSMKKHSLSIGSGWSVSLKGNNLIWTLKDSAGEVRQITFRDLPDKFNAYLANKWVFITITNDRLSSANLYINGVLMGSAEITGLGAIREDNNITLKLDRCNNNNQYVSIDKFRIFCKALNPKEIEKLYTSYLSITFLRDFWGNPLRYDTEYYLIPVASSSKDVQLKNITDYMYLTNAPSYTNGKLNIYYRRLYNGLKFIIKRYTPNNEIDSFVKSGDFIKLYVSYNNNEHIVGYPKDGNAFNNLDRILRVGYNAPGIPLYKKMEAVKLRDLKTYSVQLKLYDDKNASLGLVGTHNGQIGNDPNRDILIASNWYFNHLKDKILGCDWYFVPTDEGWTND

SEQ ID NO: 326 - protein, 111 aa, synthetic construct
  REGION 1..111: note = Synthetic Construct
PGINGKAIHLVNNESSEGPGPGFNNFTVSFWLRVPKVSASHLEQYGTGPGPGYVSIDKFRIFCKALNPKEIEKLYTSYLSGPGPGILRVGYNAPGIPLYKKMEAVKLRDLK

SEQ ID NO: 327 - protein, 111 aa, synthetic construct
  REGION 1..111: note = Synthetic Construct
PGINGKAIHLVNNESSEPMGLPFNNFTVSFWLRVPKVSASHLEQYGTPMGLPYVSIDKFRIFCKALNPKEIEKLYTSYLSPMGLPILRVGYNAPGIPLYKKMEAVKLRDLK

SEQ ID NO: 328 - protein, 180 aa, Homo sapiens
MQAEGRGTGGSTGDADGPGGPGIPDGPGGNAGGPGEAGATGGRGPRGAGAARASGPGGGAPRGPHGGAASGLNGCCRCGARGPESRLLEFYLAMPFATPMEAELARRSLAQDAPPLPVPGVLLKEFTVSGNILTIRLTAADHRQLQLSISSCLQQLSLLMWITQCFLPVFLAQPPSGQRR

SEQ ID NO: 329 - protein, 1255 aa, Homo sapiens
MELAALCRWGLLLALLPPGAASTQVCTGTDMKLRLPASPETHLDMLRHLYQGCQVVQGNLELTYLPTNASLSFLQDIQEVQGYVLIAHNQVRQVPLQRLRIVRGTQLFEDNYALAVLDNGDPLNNTTPVTGASPGGLRELQLRSLTEILKGGVLIQRNPQLCYQDTILWKDIFHKNNQLALTLIDTNRSRACHPCSPMCKGSRCWGESSEDCQSLTRTVCAGGCARCKGPLPTDCCHEQCAAGCTGPKHSDCLACLHFNHSGICELHCPALVTYNTDTFESMPNPEGRYTFGASCVTACPYNYLSTDVGSCTLVCPLHNQEVTAEDGTQRCEKCSKPCARVCYGLGMEHLREVRAVTSANIQEFAGCKKIFGSLAFLPESFDGDPASNTAPLQPEQLQVFETLEEITGYLYISAWPDSLPDLSVFQNLQVIRGRILHNGAYSLTLQGLGISWLGLRSLRELGSGLALIHHNTHLCFVHTVPWDQLFRNPHQALLHTANRPEDECVGEGLACHQLCARGHCWGPGPTQCVNCSQFLRGQECVEECRVLQGLPREYVNARHCLPCHPECQPQNGSVTCFGPEADQCVACAHYKDPPFCVARCPSGVKPDLSYMPIWKFPDEEGACQPCPINCTHSCVDLDDKGCPAEQRASPLTSIVSAVVGILLVVVLGVVFGILIKRRQQKIRKYTMRRLLQETELVEPLTPSGAMPNQAQMRILKETELRKVKVLGSGAFGTVYKGIWIPDGENVKIPVAIKVLRENTSPKANKEILDEAYVMAGVGSPYVSRLLGICLTSTVQLVTQLMPYGCLLDHVRENRGRLGSQDLLNWCMQIAKGMSYLEDVRLVHRDLAARNVLVKSPNHVKITDFGLARLLDIDETEYHADGGKVPIKWMALESILRRRFTHQSDVWSYGVTVWELMTFGAKPYDGIPAREIPDLLEKGERLPQPPICTIDVYMIMVKCWMIDSECRPRFRELVSEFSRMARDPQRFVVIQNEDLGPASPLDSTFYRSLLEDDDMGDLVDAEEYLVPQQGFFCPDPAPGAGGMVHHRHRSSSTRSGGGDLTLGLEPSEEEAPRSPLAPSEGAGSDVFDGDLGMGAAKGLQSLPTHDPSPLQRYSEDPTVPLPSETDGYVAPLTCSPQPEYVNQPDVRPQPPSPREGPLPAARPAGATLERAKTLSPGKNGVVKDVFAFGGAVENPEYLTPQGGAAPQPHPPPAFSPAFDNLYYWDQDPPERGAPPSTFKGTPTAENPEYLGLDVPV

SEQ ID NO: 330 - protein, 1196 aa, synthetic construct
  REGION 1..1196: note = Synthetic Construct
TQVCTGTDMKLRLPASPETHLDMLRHLYQGCQVVQGNLELTYLPTNASLSFLQDIQEVQGYVLIAHNQVRQVPLQRLRIVRGTQLFEDNYALAVLDNGDPLNNTTPVTGASPGGLRELQLRSLTEILKGGVLIQRNPQLCYQDTILWKDIFHKNNQLALTLIDTNRSRACHPCSPMCKGSRCWGESSEDCQSLTRTVCAGGCARCKGPLPTDCCHEQCAAGCTGPKHSDCLACLHFNHSGICELHCPALVTYNTDTFESMPNPEGRYTFGASCVTACPYNYLSTDVGSCTLVCPLHNQEVTAEDGTQRCEKCSKPCARVCYGLGMEHLREVRAVTSANIQEFAGCKKIFGSLAFLPESFDGDPASNTAPLQPEQLQVFETLEEITGYLYISAWPDSLPDLSVFQNLQVIRGRILHNGAYSLTLQGLGISWLGLRSLRELGSGLALIHHNTHLCFVHTVPWDQLFRNPHQALLHTANRPEDECVGEGLACHQLCARGHCWGPGPTQCVNCSQFLRGQECVEECRVLQGLPREYVNARHCLPCHPECQPQNGSVTCFGPEADQCVACAHYKDPPFCVARCPSGVKPDLSYMPIWKFPDEEGACQPCPINCTHSCVDLDDKGCPAEQRASPLTLLQETELVEPLTPSGAMPNQAQMRILKETELRKVKVLGSGAFGTVYKGIWIPDGENVKIPVAIAVLRENTSPKANKEILDEAYVMAGVGSPYVSRLLGICLTSTVQLVTQLMPYGCLLDHVRENRGRLGSQDLLNWCMQIAKGMSYLEDVRLVHRDLAARNVLVKSPNHVKITDFGLARLLDIDETEYHADGGKVPIKWMALESILRRRFTHQSDVWSYGVTVWELMTFGAKPYDGIPAREIPDLLEKGERLPQPPICTIDVYMIMVKCWMIDSECRPRFRELVSEFSRMARDPQRFVVIQNEDLGPASPLDSTFYRSLLEDDDMGDLVDAEEYLVPQQGFFCPDPAPGAGGMVHHRHRSSSTRSGGGDLTLGLEPSEEEAPRSPLAPSEGAGSDVFDGDLGMGAAKGLQSLPTHDPSPLQRYSEDPTVPLPSETDGYVAPLTCSPQPEYVNQPDVRPQPPSPREGPLPAARPAGATLERAKTLSPGKNGVVKDVFAFGGAVENPEYLTPQGGAAPQPHPPPAFSPAFDNLYYWDQDPPERGAPPSTFKGTPTAENPEYLGLDVPV

SEQ ID NO: 331 - protein, 610 aa, synthetic construct
  REGION 1..610: note = Synthetic Construct
TQVCTGTDMKLRLPASPETHLDMLRHLYQGCQVVQGNLELTYLPTNASLSFLQDIQEVQGYVLIAHNQVRQVPLQRLRIVRGTQLFEDNYALAVLDNGDPLNNTTPVTGASPGGLRELQLRSLTEILKGGVLIQRNPQLCYQDTILWKDIFHKNNQLALTLIDTNRSRACHPCSPMCKGSRCWGESSEDCQSLTRTVCAGGCARCKGPLPTDCCHEQCAAGCTGPKHSDCLACLHFNHSGICELHCPALVTYNTDTFESMPNPEGRYTFGASCVTACPYNYLSTDVGSCTLVCPLHNQEVTAEDGTQRCEKCSKPCARVCYGLGMEHLREVRAVTSANIQEFAGCKKIFGSLAFLPESFDGDPASNTAPLQPEQLQVFETLEEITGYLYISAWPDSLPDLSVFQNLQVIRGRILHNGAYSLTLQGLGISWLGLRSLRELGSGLALIHHNTHLCFVHTVPWDQLFRNPHQALLHTANRPEDECVGEGLACHQLCARGHCWGPGPTQCVNCSQFLRGQECVEECRVLQGLPREYVNARHCLPCHPECQPQNGSVTCFGPEADQCVACAHYKDPPFCVARCPSGVKPDLSYMPIWKFPDEEGACQPCPINCTH

SEQ ID NO: 332 - protein, 1342 aa, Homo sapiens
MRANDALQVLGLLFSLARGSEVGNSQAVCPGTLNGLSVTGDAENQYQTLYKLYERCEVVMGNLEIVLTGHNADLSFLQWIREVTGYVLVAMNEFSTLPLPNLRVVRGTQVYDGKFAIFVMLNYNTNSSHALRQLRLTQLTEILSGGVYIEKNDKLCHMDTIDWRDIVRDRDAEIVVKDNGRSCPPCHEVCKGRCWGPGSEDCQTLTKTICAPQCNGHCFGPNPNQCCHDECAGGCSGPQDTDCFACRHFNDSGACVPRCPQPLVYNKLTFQLEPNPHTKYQYGGVCVASCPHNFVVDQTSCVRACPPDKMEVDKNGLKMCEPCGGLCPKACEGTGSGSRFQTVDSSNIDGFVNCTKILGNLDFLITGLNGDPWHKIPALDPEKLNVFRTVREITGYLNIQSWPPHMHNFSVFSNLTTIGGRSLYNRGFSLLIMKNLNVTSLGFRSLKEISAGRIYISANRQLCYHHSLNWTKVLRGPTEERLDIKHNRPRRDCVAEGKVCDPLCSSGGCWGPGPGQCLSCRNYSRGGVCVTHCNFLNGEPREFAHEAECFSCHPECQPMEGTATCNGSGSDTCAQCAHFRDGPHCVSSCPHGVLGAKGPIYKYPDVQNECRPCHENCTQGCKGPELQDCLGQTLVLIGKTHLTMALTVIAGLVVIFMMLGGTFLYWRGRRIQNKRAMRRYLERGESIEPLDPSEKANKVLARIFKETELRKLKVLGSGVFGTVHKGVWIPEGESIKIPVCIKVIEDKSGRQSFQAVTDHMLAIGSLDHAHIVRLLGLCPGSSLQLVTQYLPLGSLLDHVRQHRGALGPQLLLNWGVQIAKGMYYLEEHGMVHRNLAARNVLLKSPSQVQVADFGVADLLPPDDKQLLYSEAKTPIKWMALESIHFGKYTHQSDVWSYGVTVWELMTFGAEPYAGLRLAEVPDLLEKGERLAQPQICTIDVYMVMVKCWMIDENIRPTFKELANEFTRMARDPPRYLVIKRESGPGIAPGPEPHGLTNKKLEEVELEPELDLDLDLEAEEDNLATTTLGSALSLPVGTLNRPRGSQSLLSPSSGYMPMNQGNLGESCQESAVSGSSERCPRPVSLHPMPRGCLASESSEGHVTGSEAELQEKVSMCRSRSRSRSPRPRGDSAYHSQRHSLLTPVTPLSPPGLEEEDVNGYVMPDTHLKGTPSSREGTLSSVGLSSVLGTEEEDEDEEYEYMNRRRRHSPPHPPRPSSLEELGYEYMDVGSDLSASLGSTQSCPLHPVPIMPTAGTTPDEDYEYMNRQRDGGGPGGDYAAMGACPASEQGYEEMRAFQGPGHQAPHVHYARLKTLRSLEATDSAFDNPDYWHSRLFPKANAQRT

SEQ ID NO: 333 - protein, 1295 aa, synthetic construct
  REGION 1..1295: note = Synthetic Construct
SEVGNSQAVCPGTLNGLSVTGDAENQYQTLYKLYERCEVVMGNLEIVLTGHNADLSFLQWIREVTGYVLVAMNEFSTLPLPNLRVVRGTQVYDGKFAIFVMLNYNTNSSHALRQLRLTQLTEILSGGVYIEKNDKLCHMDTIDWRDIVRDRDAEIVVKDNGRSCPPCHEVCKGRCWGPGSEDCQTLTKTICAPQCNGHCFGPNPNQCCHDECAGGCSGPQDTDCFACRHFNDSGACVPRCPQPLVYNKLTFQLEPNPHTKYQYGGVCVASCPHNFVVDQTSCVRACPPDKMEVDKNGLKMCEPCGGLCPKACEGTGSGSRFQTVDSSNIDGFVNCTKILGNLDFLITGLNGDPWHKIPALDPEKLNVFRTVREITGYLNIQSWPPHMHNFSVFSNLTTIGGRSLYNRGFSLLIMKNLNVTSLGFRSLKEISAGRIYISANRQLCYHHSLNWTKVLRGPTEERLDIKHNRPRRDCVAEGKVCDPLCSSGGCWGPGPGQCLSCRNYSRGGVCVTHCNFLNGEPREFAHEAECFSCHPECQPMEGTATCNGSGSDTCAQCAHFRDGPHCVSSCPHGVLGAKGPIYKYPDVQNECRPCHENCTQGCKGPELQDCLGQTLVLIGKTHLTYWRGRRIQNKRAMRRYLERGESIEPLDPSEKANKVLARIFKETELRKLKVLGSGVFGTVHKGVWIPEGESIKIPVCIKVIEDKSGRQSFQAVTDHMLAIGSLDHAHIVRLLGLCPGSSLQLVTQYLPLGSLLDHVRQHRGALGPQLLLNWGVQIAKGMYYLEEHGMVHRNLAARNVLLKSPSQVQVADFGVADLLPPDDKQLLESEAKTPIKWMALESIHFGKYTHQSDVWSYGVTVWELMTFGAEPYAGLRLAEVPDLLEKGERLAQPQICTIDVYMVMVKCWMIDENIRPTFKELANEFTRMARDPPRYLVIKRESGPGIAPGPEPHGLTNKKLEEVELEPELDLDLDLEAEEDNLATTTLGSALSLPVGTLNRPRGSQSLLSPSSGYMPMNQGNLGESCQESAVSGSSERCPRPVSLHPMPRGCLASESSEGHVTGSEAELQEKVSMCRSRSRSRSPRPRGDSAYHSQRHSLLTPVTPLSPPGLEEEDVNGYVMPDTHLKGTPSSREGTLSSVGLSSVLGTEEEDEDEEYEYMNPHPPRPSSLEELGYEYMDVGSDLSASLGSTQSCPLHPVPIMPTAGTTPDEDYEYMNRQRDGGGPGGDYAAMGACPASEQGYEEMRAFQGPGHQAPHVHYARLKTLRSLEATDSAFDNPDYWHSRLFPKANAQRT

SEQ ID NO: 334 - protein, 624 aa, synthetic construct
  REGION 1..624: note = Synthetic Construct
SEVGNSQAVCPGTLNGLSVTGDAENQYQTLYKLYERCEVVMGNLEIVLTGHNADLSFLQWIREVTGYVLVAMNEFSTLPLPNLRVVRGTQVYDGKFAIFVMLNYNTNSSHALRQLRLTQLTEILSGGVYIEKNDKLCHMDTIDWRDIVRDRDAEIVVKDNGRSCPPCHEVCKGRCWGPGSEDCQTLTKTICAPQCNGHCFGPNPNQCCHDECAGGCSGPQDTDCFACRHFNDSGACVPRCPQPLVYNKLTFQLEPNPHTKYQYGGVCVASCPHNFVVDQTSCVRACPPDKMEVDKNGLKMCEPCGGLCPKACEGTGSGSRFQTVDSSNIDGFVNCTKILGNLDFLITGLNGDPWHKIPALDPEKLNVFRTVREITGYLNIQSWPPHMHNFSVFSNLTTIGGRSLYNRGFSLLIMKNLNVTSLGFRSLKEISAGRIYISANRQLCYHHSLNWTKVLRGPTEERLDIKHNRPRRDCVAEGKVCDPLCSSGGCWGPGPGQCLSCRNYSRGGVCVTHCNFLNGEPREFAHEAECFSCHPECQPMEGTATCNGSGSDTCAQCAHFRDGPHCVSSCPHGVLGAKGPIYKYPDVQNECRPCHENCTQGCKGPELQDCLGQTLVLIGKTHLT

SEQ ID NO: 335 - protein, 283 aa, Homo sapiens
MEPPGDWGPPPWRSTPKTDVLRLVLYLTFLGAPCYAPALPSCKEDEYPVGSECCPKCSPGYRVKEACGELTGTVCEPCPPGTYIAHLNGLSKCLQCQMCDPAMGLRASRNCSRTENAVCGCSPGHFCIVQDGDHCAACRAYATSSPGQRVQKGGTESQDTLCQNCPPGTFSPNGTLEECQHQTKCSWLVTKAGAGTSSSHWVWWFLSGSLVIVIVCSTVGLIICVKRRKPRGDVVKVIVSVQRKRQEAEGEATVIEALQAPPDVTTVAVEETIPSFTGRSPNH

SEQ ID NO: 336 - protein, 164 aa, synthetic construct [sequence omitted]

SEQ ID NO: 337 - protein, 150 aa, Human papillomavirus type 16
MHQKRTAMFQDPQESGRKLPQLCTELQTTIHDIILECVYCKQQLLRREVYDRDLCIVYRDGNPYAVCDKCLKFYSKISEYRHYCYSLYGTTLEQQYNKPLCDLLIRCINCQKPLQRHLDKKQRFHNIRGRWTGRCMSCCRSSRTRRETQL

SEQ ID NO: 338 - protein, 150 aa, Human papillomavirus type 18
MARFEDPTRSGYKLPDLCTELNTSLQDIEITCVYCKTVLELTEVFEKDLFVVYRDSIPHAACHKCIDFYSRIRELRHYSDSVYGDTLEKLTNTGLYNLLIRCLRCQKPLLRHLNEKRRFHNIAGHYRGQCHSCCNRARQERLQRRRETQV

SEQ ID NO: 339 - protein, 98 aa, Human papillomavirus type 16
MHGDTPTLHEYMLDLQPETTDLYGYGQLNDSSEEEDEIDGPAGQAEPDRAHYNIVTFCCKCDSTLRLCVQSTHVDIRTLEDLLMGTLGIVCPICSQKP

SEQ ID NO: 340 - protein, 105 aa, Human papillomavirus type 18
MHGPKATLQDIVLHLEPQNEIPVDLLGHGQLSDSEEENDEIDGVNHQHLPARRAEPQRHTMLCMCCKCEARIELVVESSADDLRAFQQLFLNTLSFVCPWCASQQ

SEQ ID NO: 341 - protein, 253 aa, synthetic construct
  REGION 1..253: note = Synthetic Construct
MHQKRTAMFQDPQESGRKLPQLCTELQTTIHDIILECVYCKQQLLRREVYDRDLCIVYRDGNPYAVCDKCLKFYSKISEYRHYCYSLYGTTLEQQYNKPLCDLLIRCINCQKPLQRHLDKKQRFHNIRGRWTGRCMSCCRSSRTRRETQLGPGPGMHGDTPTLHEYMLDLQPETTDLYGYGQLNDSSEEEDEIDGPAGQAEPDRAHYNIVTFCCKCDSTLRLCVQSTHVDIRTLEDLLMGTLGIVCPICSQKP

SEQ ID NO: 342 - protein, 260 aa, synthetic construct
  REGION 1..260: note = Synthetic Construct
MARFEDPTRSGYKLPDLCTELNTSLQDIEITCVYCKTVLELTEVFEKDLFVVYRDSIPHAACHKCIDFYSRIRELRHYSDSVYGDTLEKLTNTGLYNLLIRCLRCQKPLLRHLNEKRRFHNIAGHYRGQCHSCCNRARQERLQRRRETQVGPGPGMHGPKATLQDIVLHLEPQNEIPVDLLGHGQLSDSEEENDEIDGVNHQHLPARRAEPQRHTMLCMCCKCEARIELVVESSADDLRAFQQLFLNTLSFVCPWCASQQ

SEQ ID NO: 343 - protein, 518 aa, synthetic construct
  REGION 1..518: note = Synthetic Construct
MHQKRTAMFQDPQESGRKLPQLCTELQTTIHDIILECVYCKQQLLRREVYDRDLCIVYRDGNPYAVCDKCLKFYSKISEYRHYCYSLYGTTLEQQYNKPLCDLLIRCINCQKPLQRHLDKKQRFHNIRGRWTGRCMSCCRSSRTRRETQLGPGPGMARFEDPTRSGYKLPDLCTELNTSLQDIEITCVYCKTVLELTEVFEKDLFVVYRDSIPHAACHKCIDFYSRIRELRHYSDSVYGDTLEKLTNTGLYNLLIRCLRCQKPLLRHLNEKRRFHNIAGHYRGQCHSCCNRARQERLQRRRETQVGPGPGMHGDTPTLHEYMLDLQPETTDLYGYGQLNDSSEEEDEIDGPAGQAEPDRAHYNIVTFCCKCDSTLRLCVQSTHVDIRTLEDLLMGTLGIVCPICSQKPGPGPGMHGPKATLQDIVLHLEPQNEIPVDLLGHGQLSDSEEENDEIDGVNHQHLPARRAEPQRHTMLCMCCKCEARIELVVESSADDLRAFQQLFLNTLSFVCPWCASQQ

SEQ ID NO: 344 - protein, 158 aa, Homo sapiens; identical to SEQ ID NO: 223

SEQ ID NO: 345 - protein, 79 aa, Homo sapiens
ARGPESRLLEFYLAMPFATPMEAELARRSLAQDAPPLPVPGVLLKEFTVSGNILTIRLTAADHRQLQLSISSCLQQQRR

SEQ ID NO: 346 - protein, 641 aa, Human gammaherpesvirus 4
MSDEGPGTGPGNGLGEKGDTSGPEGSGGSGPQRRGGDNHGRGRGRGRGRGGGRPGAPGGSGSGPRHRDGVRRPQKRPSCIGCKGTHGGTGAGAGAGGAGAGGAGAGGGAGAGGGAGGAGGAGGAGAGGGAGAGGGAGGAGGAGAGGGAGAGGGAGGAGAGGGAGGAGGAGAGGGAGAGGGAGGAGAGGGAGGAGGAGAGGGAGAGGAGGAGGAGAGGAGAGGGAGGAGGAGAGGAGAGGAGAGGAGAGGAGGAGAGGAGGAGAGGAGGAGAGGGAGGAGAGGGAGGAGAGGAGGAGAGGAGGAGAGGAGGAGAGGGAGAGGAGAGGGGRGRGGSGGRGRGGSGGRGRGGSGGRRGRGRERARGGSRERARGRGRGRGEKRPRSPSSQSSSSGSPPRRPPPGRRPFFHPVGEADYFEYHQEGGPDGEPDVPPGAIEQGPADDPGEGPSTGPRGQGDGGRRKKGGWFGKHRGQGGSNPKFENIAEGLRALLARSHVERTTDEGTWVAGVFVYGGSKTSLYNLRRGTALAIPQCRLTPLSRLPFGMAPGPGPQPGPLRESIVCYFMVFLQTHIFAEVLKDAIKDLVMTKPAPTCNIRVTVCSFDDGVDLPPWFPPMVEGAAAEGDDGDDGDEGGDGDEGEEGQE

SEQ ID NO: 347 - protein, 391 aa, Human gammaherpesvirus 4
MSDEGPGTGPGNGLGEKGDTSGPEGSGGSGPQRRGGDNHGRGRGRGRGRGGGRPGAPGGSGSGPRHRDGVRRPQKRPSCIGCKGTHRGRGGSGGRGRGGSGGRRGRGRERARGGSRERARGRGRGRGEKRPRSPSSQSSSSGSPPRRPPPGRRPFFHPVGEADYFEYHQEGGPDGEPDVPPGAIEQGPADDPGEGPSTGPRGQGDGGRRKKGGWFGKHRGQGGSNPKFENIAEGLRALLARSHVERTTDEGTWVAGVFVYGGSKTSLYNLRRGTALAIPQCRLTPLSRLPFGMAPGPGPQPGPLRESIVCYFMVFLQTHIFAEVLKDAIKDLVMTKPAPTCNIRVTVCSFDDGVDLPPWFPPMVEGAAAEGDDGDDGDEGGDGDEGEEGQE

SEQ ID NO: 348 - protein, 860 aa, Human gammaherpesvirus 4
MEAALLVCQYTIQSLIHLTGEDPGFFNVEIPEFPFYPTCNVCTADVNVTINFDVGGKKHQLDLDFGQLTPHTKAVYQPRGAFGGSENATNLFLLELLGAGELALTMRSKKLPINVTTGEEQQVSLESVDVYFQDVFGTMWCHHAEMQNPVYLIPETVPYIKWDNCNSTNITAVVRAQGLDVTLPLSLPTSAQDSNFSVKTEMLGNEIDIECIMEDGEISQVLPGDNKFNITCSGYESHVPSGGILTSTSPVATPIPGTGYAYSLRLTPRPVSRFLGNNSILYVFYSGNGPKASGGDYCIQSNIVFSDEIPASQDMPTNTTDITYVGDNATYSVPMVTSEDANSPNVTVTAFWAWPNNTETDFKCKWTLTSGTPSGCENISGAFASNRTFDITVSGLGTAPKTLIITRTATNATTTTHKVIFSKAPESTTTSPTLNTTGFADPNTTTGLPSSTHVPTNLTAPASTGPTVSTADVTSPTPAGTTSGASPVTPSPSPWDNGTESKAPDMTSSTSPVTTPTPNATSPTPAVTTPTPNATSPTPAVTTPTPNATSPTLGKTSPTSAVTTPTPNATSPTLGKTSPTSAVTTPTPNATSPTLGKTSPTSAVTTPTPNATGPTVGETSPQANATNHTLGGTSPTPVVTSQPKNATSAVTTGQHNITSSSTSSMSLRPSSNPETLSPSTSDNSTSHMPLLTSAHPTGGENITQVTPASISTHHVSTSSPAPRPGTTSQASGPGNSSTSTKPGEVNVTKGTPPQNATSPQAPSGQKTAVPTVTSTGGKANSTTGGKHTTGHGARTSTEPTTDYGGDSTTPRPRYNATTYLPPSTSSKLRPRWTFTSPPVTTAQATVPVPPTSQPRFSNLS

SEQ ID NO: 349 - protein, 497 aa, Human gammaherpesvirus 4
MGSLEMVPMGAGPPSPGGDPDGYDGGNNSQYPSASGSSGNTPTPPNDEERESNEEPPPPYEDPYWGNGDRHSDYQPLGTQDQSLYLGLQHDGNDGLPPPPYSPRDDSSQHIYEEAGRGSMNPVCLPVIVAPYLFWLAAIAASCFTASVSTVVTATGLALSLLLLAAVASSYAAAQRKLLTPVTVLTAVVTFFAICLTWRIEDPPFNSLLFALLAAAGGLQGIYVLVMLVLLILAYRRRWRRLTVCGGIMFLACVLVLIVDAVLQLSPLLGAVTVVSMTLLLLAFVLWLSSPGGLGTLGAALLTLAAALALLASLILGTLNLTTMFLLMLLWTLVVLLICSSCSSCPLSKILLARLFLYALALLLLASALIAGGSILQTNFKSLSSTEFIPNLFCMLLLIVAGILFILAILTEWGSGNRTYGPVFMCLGGLLTMVAGAVWLTVMSNTLLSAWILTAGFLIFLIGFALFGVIRCCRYCCYYCLTLESEERPPTPYRNTV

SEQ ID NO: 350 - protein, 540 aa, Homo sapiens
AQPPPPPPDATCHQVRSFFQRLQPGLKWVPETPVPGSDLQVCLPKGPTCCSRKMEEKYQLTARLNMEQLLQSASMELKFLIIQNAAVFQEAFEIVVRHAKNYTNAMFKNNYPSLTPQAFEFVGEFFTDVSLYILGSDINVDDMVNELFDSLFPVIYTQLMNPGLPDSALDINECLRGARRDLKVFGNFPKLIMTQVSKSLQVTRIFLQALNLGIEVINTTDHLKFSKDCGRMLTRMWYCSYCQGLMMVKPCGGYCNVVMQGCMAGVVEIDKYWREYILSLEELVNGMYRIYDMENVLLGLFSTIHDSIQYVQKNAGKLTTTIGKLCAHSQQRQYRSAYYPEDLFIDKKVLKVAHVEHEETLSSRRRELIQKLKSFISFYSALPGYICSHSPVAENDTLCWNGQELVERYSQKAARNGMKNQFNLHELKMKGPEPVVSQIIDKLKHINQLLRTMSMPKGRVLDKNLDEEGFESGDCGDDEDECIGGSGDGMIKVKNQLRFLAELAYDLDVDDAPGNSQQATPKDNEISTFHNLGNVHSPLK

SEQ ID NO: 351 - protein, 192 aa, Hepatitis B virus
  SITE 192: note = Xaa can be any naturally occurring amino acid
MQWNSTTFHQTLQDPRVRGLYFPAGGSSSGTVNPVLTTASPLSSIFSRIGDPALNMENITSGTIPQSLDSWWTSLNFLGGTTVCLGQNSQSPTSNHSPTSCPPTCPGYRWMCLRRDYQGMLPVCPLIPGSSTTSTGPCRTCMTTAQGTSMYPSCCCTKPSDGNCTCIPIPSSWAFGKFLWEWASARYWGPSX

SEQ ID NO: 352 - protein, 120 aa, Hepatitis B virus
MAARLCCQLDPARDVLCLRPVGAESRGRPLSGPLGALPSPSPSAVPADHGAHLSLRGLPVCAFSSAGPCALRFTSARRMETTVNAHQILPKVLHKRTFGLSAMSTTDLEAYFKDCVFKDW

SEQ ID NO: 353 - protein, 120 aa, Homo sapiens
MMTGTIETTGNISAEKGGSIILQCHLSSTTAQVTQVNWEQQDQLLAICNADLGWHISPSFKDRVAPGPGLGLTLQSLTVNDTGEYFCIYHTYPDGTYTGRIFLEVLESSVAEHGARFQIP

SEQ ID NO: 354 - protein, 289 aa, Homo sapiens [sequence omitted]

SEQ ID NO: 355 - protein, 719 aa, Homo sapiens
QDPWAAEPRAACGPSSCYALFPRRRTFLEAWRACRELGGDLATPRTPEEAQRVDSLVGAGPASRLLWIGLQRQARQCQLQRPLRGFTWTTGDQDTAFTNWAQPASGGPCPAQRCVALEASGEHRWLEGSCTLAVDGYLCQFGFEGACPALQDEAGQAGPAVYTTPFHLVSTEFEWLPFGSVAAVQCQAGRGASLLCVKQPEGGVGWSRAGPLCLGTGCSPDNGGCEHECVEEVDGHVSCRCTEGFRLAADGRSCEDPCAQAPCEQQCEPGGPQGYSCHCRLGFRPAEDDPHRCVDTDECQIAGVCQQMCVNYVGGFECYCSEGHELEADGISCSPAGAMGAQASQDLGDELLDDGEDEEDEDEAWKAFNGGWTEMPGILWMEPTQPPDFALAYRPSFPEDREPQIPYPEPTWPPPLSAPRVPYHSSVLSVTRPVVVSATHPTLPSAHQPPVIPATHPALSRDHQIPVIAANYPDLPSAYQPGILSVSHSAQPPAHQPPMISTKYPELFPAHQSPMFPDTRVAGTQTTTHLPGIPPNHAPLVTTLGAQLPPQAPDALVLRTQATQLPIIPTAQPSLTTTSRSPVSPAHQISVPAATQPAALPTLLPSQSPTNQTSPISPTHPHSKAPQIPREDGPSPKLALWLPSPAPTAAPTALGEAGLAEHSQRDDRWLYCTRCGPHAPNKRITDCYRWVIHAGSKSPTEPMPPRGSLTGVQTCRTSV

SEQ ID NO: 356 - protein, 653 aa, synthetic construct
  REGION 1..653: note = Synthetic Construct
TQVCTGTDMKLRLPASPETHLDMLRHLYQGCQVVQGNLELTYLPTNASLSFLQDIQEVQGYVLIAHNQVRQVPLQRLRIVRGTQLFEDNYALAVLDNGDPLNNTTPVTGASPGGLRELQLRSLTEILKGGVLIQRNPQLCYQDTILWKDIFHKNNQLALTLIDTNRSRACHPCSPMCKGSRCWGESSEDCQSLTRTVCAGGCARCKGPLPTDCCHEQCAAGCTGPKHSDCLACLHFNHSGICELHCPALVTYNTDTFESMPNPEGRYTFGASCVTACPYNYLSTDVGSCTLVCPLHNQEVTAEDGTQRCEKCSKPCARVCYGLGMEHLREVRAVTSANIQEFAGCKKIFGSLAFLPESFDGDPASNTAPLQPEQLQVFETLEEITGYLYISAWPDSLPDLSVFQNLQVIRGRILHNGAYSLTLQGLGISWLGLRSLRELGSGLALIHHNTHLCFVHTVPWDQLFRNPHQALLHTANRPEDECVGEGLACHQLCARGHCWGPGPTQCVNCSQFLRGQECVEECRVLQGLPREYVNARHCLPCHPECQPQNGSVTCFGPEADQCVACAHYKDPPFCVARCPSGVKPDLSYMPIWKFPDEEGACQPCPINCTHSCVDLDDKGCPAEQRASPLTSIVSAVVGILLVVVLGVVFGILI

SEQ ID NO: 357 - protein, 651 aa, Homo sapiens
KLTIESTPFNVAEGKEVLLLVHNLPQHLFGYSWYKGERVDGNRQIIGYVIGTQQATPGPAYSGREIIYPNASLLIQNIIQNDTGFYTLHVIKSDLVNEEATGQFRVYPELPKPSISSNNSKPVEDKDAVAFTCEPETQDATYLWWVNNQSLPVSPRLQLSNGNRTLTLFNVTRNDTASYKCETQNPVSARRSDSVILNVLYGPDAPTISPLNTSYRSGENLNLSCHAASNPPAQYSWFVNGTFQQSTQELFIPNITVNNSGSYTCQAHNSDTGLNRTTVTTITVYAEPPKPFITSNNSNPVEDEDAVALTCEPEIQNTTYLWWVNNQSLPVSPRLQLSNDNRTLTLLSVTRNDVGPYECGIQNKLSVDHSDPVILNVLYGPDDPTISPSYTYYRPGVNLSLSCHAASNPPAQYSWLIDGNIQQHTQELFISNITEKNSGLYTCQANNSASGHSRTTVKTITVSAELPKPSISSNNSKPVEDKDAVAFTCEPEAQNTTYLWWVNGQSLPVSPRLQLSNGNRTLTLFNVTRNDARAYVCGIQNSVSANRSDPVTLDVLYGPDTPIISPPDSSYLSGANLNLSCHSASNPSPQYSWRINGIPQQHTQVLFIAKITPNNNGTYACFVSNLATGRNNSIVKSITVSASGTSPGLSA

SEQ ID NO: 358 - protein, 76 aa, Homo sapiens
MKTNDTYMKFSWLTVPEKSLDKEHRCIVRHENNKNGVDQEIIFPPIKTDVITMDPKDNCSKDANDTLLLQLTNTSA

SEQ ID NO: 359 - protein, 324 aa, Homo sapiens
MVQRLWVSRLLRHRKAQLPPLLLEVGVEEKSASDHWRGRYGRRRPLAGLLCPDPRPTPLEALLSDLFRDPDHCRQADWDTSALAPYLGTQEECEEAALGPTEPAEGLSAPSLSPHCCPCRARLAFRNLGALLPRLHQLCCRMPRTLRRLVGEGLYQGVPRAEPGTEARRHYDEGVRRLVQRFGTRASVAVVTASYHREKQVFLPKYRGDTGGASSEDSLMTSFLPGPKPGAPFPNGHVGAGGSGLLPPPPALCGASACDVSVRVVVGEPTEARVVPGRGICLDLAILDSAFLLSQVAPSLFMGSIVQLSQSVTFDKSDLAKYSA

SEQ ID NO: 360 - protein, 729 aa, Homo sapiens
MWNLLHETDSAVATARRPRWLCKSSNEATNITPKHNMKAFLDELKAENIKKFLYNFTQIPHLAGTEQNFQLAKQIQSQWKEFGLDSVELAHYDVLLSYPNKTHPNYISIINEDGNEIFNTSLFEPPPPGYENVSDIVPPFSAFSPQGMPEGDLVYVNYARTEDFFKLERDMKINCSGKIVIARYGKVFRGNKVKNAQLAGAKGVILYSDPADYFAPGVKSYPDGWNLPGGGVQRGNILNLNGAGDPLTPGYPANEYAYRRGIAEAVGLPSIPVHPIGYYDAQKLLEKMGGSAPPDSSWRGSLKVPYNVGPGFTGNFSTQKVKMHIHSTNEVTRIYNVIGTLRGAVEPDRYVILGGHRDSWVFGGIDPQSGAAVVHEIVRSFGTLKKEGWRPRRTILFASWDAEEFGLLGSTEWAEENSRLLQERGVAYINADSSIEGNYTLRVDCTPLMYSLVHNLTKELKSPDEGFEGKSLYESWTKKSPSPEFSGMPRISKLGSGNDFEVFFQRLGIASGRARYTKNWETNKFSGYPLYHSVYETYELVEKFYDPMFKYHLTVAQVRGGMVFELANSIVLPFDCRDYAVVLRKYADKIYSISMKHPQEMKTYSVSFDSLFSAVKNFTEIASKFSERLQDFDKSNPIVLRMMNDQLMFLERAFIDPLGLPDRPFYRHVIYAPSSHNKYAGESFPGIYDALFDIESKVDPSKAWGEVKRQIYVAAFTVQAAAETLSEVA

SEQ ID NO: 361 - protein, 165 aa, Homo sapiens
MGAPTLPPAWQPFLKDHRISTFKNWPFLEGCACTPERMAEAGFIHCPTENEPDLAQCFFCFKELEGWEPDDDPIGPGTVAYACNTSTLGGRGGRITREEHKKHSSGCAFLSVKKQFEELTLGEFLKLDRERAKNKIAKETNNKKKEFEETAKKVRRAIEQLAAMD

SEQ ID NO: 362 - protein, 1137 aa, Homo sapiens
TGSGHASSTPGGEKETSATQRSSVPSSTEKNAVSMTSSVLSSHSPGSGSSTTQGQDVTLAPATEPASGSAATWGQDVTSVPVTRPALGSTTPPAHDVTSAPDNKPAPGSTAPPAHGVTSAPDTRPAPGSTAPPAHGVTSAPDTRPAPGSTAPPAHGVTSAPDTRPAPGSTAPPAHGVTSAPDTRPAPGSTAPPAHGVTSAPDTRPAPGSTAPPAHGVTSAPDTRPAPGSTAPPAHGVTSAPDTRPAPGSTAPPAHGVTSAPDTRPAPGSTAPPAHGVTSAPDTRPAPGSTAPPAHGVTSAPDTRPAPGSTAPPAHGVTSAPDTRPAPGSTAPPAHGVTSAPDTRPAPGSTAPPAHGVTSAPDTRPAPGSTAPPAHGVTSAPDTRPAPGSTAPPAHGVTSAPDTRPAPGSTAPPAHGVTSAPDTRPAPGSTAPPAHGVTSAPDTRPAPGSTAPPAHGVTSAPDTRPAPGSTAPPAHGVTSAPDTRPAPGSTAPPAHGVTSAPDTRPAPGSTAPPAHGVTSAPDTRPAPGSTAPPAHGVTSAPDTRPAPGSTAPPAHGVTSAPDTRPAPGSTAPPAHGVTSAPDTRPAPGSTAPPAHGVTSAPDTRPAPGSTAPPAHGVTSAPDTRPAPGSTAPPAHGVTSAPDTRPAPGSTAPPAHGVTSAPDTRPAPGSTAPPAHGVTSAPDTRPAPGSTAPPAHGVTSAPDTRPAPGSTAPPAHGVTSAPDTRPAPGSTAPPAHGVTSAPDTRPAPGSTAPPAHGVTSAPDTRPAPGSTAPPAHGVTSAPDTRPAPGSTAPPAHGVTSAPDTRPAPGSTAPPAHGVTSAPDTRPAPGSTAPPAHGVTSAPDTRPAPGSTAPPAHGVTSAPDTRPAPGSTAPPAHGVTSAPDTRPAPGSTAPPAHGVTSAPDTRPAPGSTAPPAHGVTSAPDNRPALGSTAPPVHNVTSASGSASGSASTLVHNGTSARATTTPASKSTPFSIPSHHSDTPTTLASHSTKTDASSTHHSSVPPLTSSNHSTSPQLSTGVSFFFLSFHISNLQFNSSLEDPSTDYYQELQRDISEMFLQIYKQGGFLGLSNIKFRPGSVVVQLTLAFREGTINVHDVETQFNQYKTEAASRYNLTISDVSVSDVPFPFSAQSGAGVPG

SEQ ID NO: 363 - protein, 252 aa, Homo sapiens
TGSGHASSTPGGEKETSATQRSSVPSSTEKNALSTGVSFFFLSFHISNLQFNSSLEDPSTDYYQELQRDISEMFLQIYKQGGFLGLSNIKFRPGSVVVQLTLAFREGTINVHDVETQFNQYKTEAASRYNLTISDVSVSDVPFPFSAQSGAGVPGWGIALLVLVCVLVALAIVYLIALAVCQCRRKNYGQLDIFPARDTYHPMSEYPTYHTHGRYVPPSSTDRSPYEKVSAGNGGSSLSYTNPAVAATSANL

SEQ ID NO: 364 - protein, 241 aa, Homo sapiens
MKIFMYLLTVFLITQMIGSALFAVYLHRRLDKIEDERNLHEDFVFMKTIQRCNTGERSLSLLNCEEIKSQFEGFVKDIMLNKEETKKENSFEMQKGDQNPQIAAHVISEASSKTTSVLQWAEKGYYTMSNNLVTLENGKQLTVKRQGLYYIYAQVTFCSNREASSQAPFIASLCLKSPGRFERILLRAANTHSSAKPCGQQSIHLGGVFELQPGASVFVNVTDPSQVSHGTGFTSFGLLKL

SEQ ID NO: 365 - protein, 449 aa, Homo sapiens
MGSDVRDLNALLPAVPSLGGGGGCALPVSGAAQWAPVLDFAPPGASAYGSLGGPAPPPAPPPPPPPPPHSFIKQEPSWGGAEPHEEQCLSAFTVHFSGQFTGTAGACRYGPFGPPPPSQASSGQARMFPNAPYLPSCLESQPAIRNQGYSTVTFDGTPSYGHTPSHHAAQFPNHSFKHEDPMGQQGSLGEQQYSVPPPVYGCHTPTDSCTGSQALLLRTPYSSDNLYQMTSQLECMTWNQMNLGATLKGVAAGSSSSVKWTEGQSNHSTGYESDNHTTPILCGAQYRIHTHGVFRGIQDVRRVPGVAPTLVRSASETSEKRPFMCAYPGCNKRYFKLSHLQMHSRKHTGEKPYQCDFKDCERRFSRSDQLKRHQRRHTGVKPFQCKTCQRKFSRSDHLKTHTRTHTGKTSEKPFSCRWPSCQKKFARSDELVRHHNMHQRNMTKLQLAL

SEQ ID NO: 366 - protein, 322 aa, Homo sapiens
MGSDVRDLNALLPAVPSLGGGGGCALPVSGAAQWAPVLDFAPPGASAYGSLGGPAPPPAPPPPPPPPPHSFIKQEPSWGGAEPHEEQCLSAFTVHFSGQFTGTAGACRYGPFGPPPPSQASSGQARMFPNAPYLPSCLESQPAIRNQGYSTVTFDGTPSYGHTPSHHAAQFPNHSFKHEDPMGQQGSLGEQQYSVPPPVYGCHTPTDSCTGSQALLLRTPYSSDNLYQMTSQLECMTWNQMNLGATLKGVAAGSSSSVKWTEGQSNHSTGYESDNHTTPILCGAQYRIHTHGVFRGIQDVRRVPGVAPTLVRSASETSEKRP

SEQ ID NO: 367 - protein, 509 aa, Homo sapiens
MERRRLWGSIQSRYISMSVWTSPRRLVELAGQSLLKDEALAIAALELLPRELFPPLFMAAFDGRHSQTLKAMVQAWPFTCLPLGVLMKGQHLHLETFKAVLDGLDVLLAQEVRPRRWKLQVLDLRKNSHQDFWTVWSGNRASLYSFPEPEAAQPMTKKRKVDGLSTEAEQPFIPVEVLVDLFLKEGACDELFSYLIEKVKRKKNVLRLCCKKLKIFAMPMQDIKMILKMVQLDSIEDLEVTCTWKLPTLAKFSPYLGQMINLRRLLLSHIHASSYISPEKEEQYIAQFTSQFLSLQCLQALYVDSLFFLRGRLDQLLRHVMNPLETLSITNCRLSEGDVMHLSQSPSVSQLSVLSLSGVMLTDVSPEPLQALLERASATLQDLVFDECGITDDQLLALLPSLSHCSQLTTLSFYGNSISISALQSLLQHLIGLSNLTHVLYPVPLESYEDIHGTLHLERLAYLHARLRELLCELGRPSMVWLSANPCPHCGDRTFYDPEPILCPCFMPN

SEQ ID NO: 368 - protein, 210 aa, Homo sapiens
MQAEGQGTGGSTGDADGPGGPGIPDGPGGNAGGPGEAGATGGRGPRGAGAARASGPRGGAPRGPHGGAASAQDGRCPCGARRPDSRLLQLHITMPFSSPMEAELVRRILSRDAAPLPRPGAVLKDFTVSGNLLFMSVRDQDREGAGRMRVVGWGLGSASPEGQKARDLRTPKHKVSEQRPGTPGPPPPEGAQGDGCRGVAFNVMFSAPHI

SEQ ID NO: 369 - protein, 314 aa, Homo sapiens; identical to SEQ ID NO: 262

SEQ ID NO: 370 - protein, 562 aa, synthetic construct
  REGION 1..562: note = Synthetic Construct
MAPRSARRPLLLLLLLLLLGLMHCASAAMFMVKNGNGTACIMANFSAAFSVNYDTKSGPKNMTLDLPSDATVVLNRSSCGKENTSDPSLVIAFGRGHTLTLNFTRNATRYSVQLMSFVYNLSDTHLFPNASSKEIKTVESITDIRADIDKKYRCVSGTQVHMNNVTVTLHDATIQAYLSNSSFSRGETRCEQDRPSPTTAPPAPPSPSPSPVPKSPSVDKYNVSGTNGTCLLASMGLQLNLTYERKDNTTVTRLLNINPNKTSASGSCGAHLVTLELHSEGTTVLLFQFGMNASSSRFFLQGIQLNTILPDARDPAFKAANGSLRALQATVGNSYKCNAEEHVRVTKAFSVNIFKVWVQAFKVEGGQFGSVEECLLDENSLEMGAPTLPPAWQPFLKDHRISTFKNWPFLEGCACTPERMAEAGFIHCPTENEPDLAQCFFCFKELEGWEPDDDPIEEHKKHSSGCAFLSVKKQFEELTLGEFLKLDRERAKNKIAKETNNKKKEFEETAKKVRRAIEQLAAMDEFTLIPIAVGGALAGLVLIVLIAYLVGRKRSHAGYQTI

SEQ ID NO: 371 - protein, 558 aa, synthetic construct
  REGION 1..558: note = Synthetic Construct
MAPRSARRPLLLLLLLLLLGLMHCASAMGAPTLPPAWQPFLKDHRISTFKNWPFLEGCACTPERMAEAGFIHCPTENEPDLAQCFFCFKELEGWEPDDDPIEEHKKHSSGCAFLSVKKQFEELTLGEFLKLDRERAKNKIAKETNNKKKEFEETAKKVRRAIEQLAAMDAMFMVKNGNGTACIMANFSAAFSVNYDTKSGPKNMTLDLPSDATVVLNRSSCGKENTSDPSLVIAFGRGHTLTLNFTRNATRYSVQLMSFVYNLSDTHLFPNASSKEIKTVESITDIRADIDKKYRCVSGTQVHMNNVTVTLHDATIQAYLSNSSFSRGETRCEQDRPSPTTAPPAPPSPSPSPVPKSPSVDKYNVSGTNGTCLLASMGLQLNLTYERKDNTTVTRLLNINPNKTSASGSCGAHLVTLELHSEGTTVLLFQFGMNASSSRFFLQGIQLNTILPDARDPAFKAANGSLRALQATVGNSYKCNAEEHVRVTKAFSVNIFKVWVQAFKVEGGQFGSVEECLLDENSMLIPIAVGGALAGLVLIVLIAYLVGRKRSHAGYQTI

SEQ ID NO: 372 - protein, 370 aa, synthetic construct
  REGION 1..370: note = Synthetic Construct
MAPRSARRPLLLLLLLLLLGLMHCASAMGAPTLPPAWQPFLKDHRISTFKNWPFLEGCACTPERMAEAGFIHCPTENEPDLAQCFFCFKELEGWEPDDDPIEEHKKHSSGCAFLSVKKQFEELTLGEFLKLDRERAKNKIAKETNNKKKEFEETAKKVRRAIEQLAAMDAMFMVKNGNGTACIMANFSAAFSVNYDTKSGPKNMTLDLPSDATVVLNRSSCGKENTSDPSLVIAFGRGHTLTLNFTRNATRYSVQLMSFVYNLSDTHLFPNASSKEIKTVESITDIRADIDKKYRCVSGTQVHMNNVTVTLHDATIQAYLSNSSFSRGETRCEQDLIPIAVGGALAGLVLIVLIAYLVGRKRSHAGYQTI

SEQ ID NO: 373 - protein, 375 aa, synthetic construct
  REGION 1..375: note = Synthetic Construct
MAPRSARRPLLLLLLLLLLGLMHCASAAMFMVKNGNGTACIMANFSAAFSVNYDTKSGPKNMTLDLPSDATVVLNRSSCGKENTSDPSLVIAFGRGHTLTLNFTRNATRYSVQLMSFVYNLSDTHLFPNASSKEIKTVESITDIRADIDKKYRCVSGTQVHMNNVTVTLHDATIQAYLSNSSFSRGETRCEQDLEMGAPTLPPAWQPFLKDHRISTFKNWPFLEGCACTPERMAEAGFIHCPTENEPDLAQCFFCFKELEGWEPDDDPIEEHKKHSSGCAFLSVKKQFEELTLGEFLKLDRERAKNKIAKETNNKKKEFEETAKKVRRAIEQLAAMDEFTLIPIAVGGALAGLVLIVLIAYLVGRKRSHAGYQTI

SEQ ID NO: 374 - protein, 527 aa, synthetic construct
  REGION 1..527: note = Synthetic Construct
MAPRSARRPLLLLLLLLLLGLMHCASAAMFMVKNGNGTACIMANFSAAFSVNYDTKSGPKNMTLDLPSDATVVLNRSSCGKENTSDPSLVIAFGRGHTLTLNFTRNATRYSVQLMSFVYNLSDTHLFPNASSKEIKTVESITDIRADIDKKYRCVSGTQVHMNNVTVTLHDATIQAYLSNSSFSRGETRCEQDLEMGAPTLPPAWQPFLKDHRISTFKNWPFLEGCACTPERMAEAGFIHCPTENEPDLAQCFFCFKELEGWEPDDDPIEEHKKHSSGCAFLSVKKQFEELTLGEFLKLDRERAKNKIAKETNNKKKEFEETAKKVRRAIEQLAAMDEFTCLLASMGLQLNLTYERKDNTTVTRLLNINPNKTSASGSCGAHLVTLELHSEGTTVLLFQFGMNASSSRFFLQGIQLNTILPDARDPAFKAANGSLRALQATVGNSYKCNAEEHVRVTKAFSVNIFKVWVQAFKVEGGQFGSVEECLLDENSMLIPIAVGGALAGLVLIVLIAYLVGRKRSHAGYQTI

SEQ ID NO: 375 - protein, 365 aa, synthetic construct
  REGION 1..365: note = 1A01_HLA-A/m__Homo_sapiens__P30443
MAVMAPRTLLLLLSGALALTQTWAGSHSMRYFFTSVSRPGRGEPRFIAVGYVDDTQFVRFDSDAASQKMEPRAPWIEQEGPEYWDQETRNMKAHSQTDRANLGTLRGYYNQSEDGSHTIQIMYGCDVGPDGRFLRGYRQDAYDGKDYIALNEDLRSWTAADMAAQITKRKWEAVHAAEQRRVYLEGRCVDGLRRYLENGKETLQRTDPPKTHMTHHPISDHEATLRCWALGFYPAEITLTWQRDGEDQTQDTELVETRPAGDGTFQKWAAVVVPSGEEQRYTCHVQHEGLPKPLTLRWELSSQPTIPIVGIIAGLVLLGAVITGAVVAAVMWRRKSSDRKGGSYTQAASSDSAQGSDVSLTACKV

SEQ ID NO: 376 - protein, 365 aa, synthetic construct [sequence omitted]

SEQ ID NO: 377 - protein, 420 aa, synthetic construct
  REGION 1..420: note = 5T4__Homo_sapiens__Q13641
MPGGCSRGPAAGDGRLRLARLALVLLGWVSSSSPTSSASSFSSSAPFLASAVSAQPPLPDQCPALCECSEAARTVKCVNRNLTEVPTDLPAYVRNLFLTGNQLAVLPAGAFARRPPLAELAALNLSGSRLDEVRAGAFEHLPSLRQLDLSHNPLADLSPFAFSGSNASVSAPSPLVELILNHIVPPEDERQNRSFEGMVVAALLAGRALQGLRRLELASNHFLYLPRDVLAQLPSLRHLDLSNNSLVSLTYVSFRNLTHLESLHLEDNALKVLHNGTLAELQGLPHIRVFLDNNPWVCDCHMADMVTWLKETEVVQGKDRLTCAYPEKMRNRVLLELNSADLDCDPILPPSLQTSYVFLGIVLALIGAIFLLVLYLNRKGIKKWMHNIRDACRDHMEGYHYRYEINADPRLTNLSSNSDV

SEQ ID NO: 378 - protein, 543 aa, synthetic construct
  REGION 1..543: note = ACRBP__Homo_sapiens__Q8NEB7
MRKPAAGFLPSLLKVLLLPLAPAAAQDSTQASTPGSPLSPTEYERFFALLTPTWKAETTCRLRATHGCRNPTLVQLDQYENHGLVPDGAVCSNLPYASWFESFCQFTHYRCSNHVYYAKRVLCSQPVSILSPNTLKEIEASAEVSPTTMTSPISPHFTVTERQTFQPWPERLSNNVEELLQSSLSLGGQEQAPEHKQEQGVEHRQEPTQEHKQEEGQKQEEQEEEQEEEGKQEEGQGTKEGREAVSQLQTDSEPKFHSESLSSNPSSFAPRVREVESTPMIMENIQELIRSAQEIDEMNEIYDENSYWRNQNPGSLLQLPHTEALLVLCYSIVENTCIITPTAKAWKYMEEEILGFGKSVCDSLGRRHMSTCALCDFCSLKLEQCHSEASLQRQQCDTSHKTPFVSPLLASQSLSIGNQVGSPESGRFYGLDLYGGLHMDFWCARLATKGCEDVRVSGWLQTEFLSFQDGDFPTKICDTDYIQYPNYCSFKSQQCLMRNRNRKVSRMRCLQNETYSALSPGKSEDVVLRWSQEFSTLTLGQFG

SEQ ID NO: 379 - protein, 609 aa, synthetic construct
  REGION 1..609: note = AFP__Homo_sapiens__P02771
MKWVESIFLIFLLNFTESRTLHRNEYGIASILDSYQCTAEISLADLATIFFAQFVQEATYKEVSKMVKDALTAIEKPTGDEQSSGCLENQLPAFLEELCHEKEILEKYGHSDCCSQSEEGRHNCFLAHKKPTPASIPLFQVPEPVTSCEAYEEDRETFMNKFIYEIARRHPFLYAPTILLWAARYDKIIPSCCKAENAVECFQTKAATVTKELRESSLLNQHACAVMKNFGTRTFQAITVTKLSQKFTKVNFTEIQKLVLDVAHVHEHCCRGDVLDCLQDGEKIMSYICSQQDTLSNKITECCKLTTLERGQCIIHAENDEKPEGLSPNLNRFLGDRDFNQFSSGEKNIFLASFVHEYSRRHPQLAVSVILRVAKGYQELLEKCFQTENPLECQDKGEEELQKYIQESQALAKRSCGLFQKLGEYYLQNAFLVAYTKKAPQLTSSELMAITRKMAATAATCCQLSEDKLLACGEGAADIIIGHLCIRHEMTPVNPGVGQCCTSSYANRRPCFSSLVVDETYVPPAFSDDKFIFHKDLCQAQGVALQTMKQEFLINLVKQKPQITEEQLEAVIADFSGLLEKCCQGQEQEVCFAEEGQKLISKTRAALGV

SEQ ID NO: 380 - protein, 854 aa, synthetic construct
  REGION 1..854: note = AKAP4__Homo_sapiens__Q5JQC9
MMAYSDTTMMSDDIDWLRSHRGVCKVDLYNPEGQQDQDRKVICFVDVSTLNVEDKDYKDAASSSSEGNLNLGSLEEKEIIVIKDTEKKDQSKTEGSVCLFKQAPSDPVSVLNWLLSDLQKYALGFQHALSPSTSTCKHKVGDTEGEYHRASSENCYSVYADQVNIDYLMNRPQNLRLEMTAAKNTNNNQSPSAPPAKPPSTQRAVISPDGECSIDDLSFYVNRLSSLVIQMAHKEIKEKLEGKSKCLHHSICPSPGNKERISPRTPASKIASEMAYEAVELTAAEMRGTGEESREGGQKSFLYSELSNKSKSGDKQMSQRESKEFADSISKGLMVYANQVASDMMVSLMKTLKVHSSGKPIPASVVLKRVLLRHTKEIVSDLIDSCMKNLHNITGVLMTDSDFVSAVKRNLFNQWKQNATDIMEAMLKRLVSALIGEEKETKSQSLSYASLKAGSHDPKCRNQSLEFSTMKAEMKERDKGKMKSDPCKSLTSAEKVGEHILKEGLTIWNQKQGNSCKVATKACSNKDEKGEKINASTDSLAKDLIVSALKLIQYHLTQQTKGKDTCEEDCPGSTMGYMAQSTQYEKCGGGQSAKALSVKQLESHRAPGPSTCQKENQHLDSQKMDMSNIVLMLIQKLLNENPFKCEDPCEGENKCSEPRASKAASMSNRSDKAEEQCQEHQELDCTSGMKQANGQFIDKLVESVMKLCLIMAKYSNDGAALAELEEQAASANKPNFRGTRCIHSGAMPQNYQDSLGHEVIVNNQCSTNSLQKQLQAVLQWIAASQFNVPMLYFMGDKDGQLEKLPQVSAKAAEKGYSVGGLLQEVMKFAKERQPDEAVGKVARKQLLDWLLANL

SEQ ID NO: 381 - protein, 416 aa, synthetic construct
  REGION 1..416: note = alpha-actinin-_4/m__Homo_sapiens__B4DSX0
MVDYHAANQSYQYGPSSAGNGAGGGGSMGDYMAQEDDWDRDLLLDPAWEKQQRKTFTAWCNSHLRKAGTQIENIDEDFRDGLKLMLLLEVISGERLPKPERGKMRVHKINNVNKALDFIASKGVKLVSIGAEEIVDGNAKMTLGMIWTIILRFAIQDISVEETSAKEGLLLWCQRKTAPYKNVNVQNFHISWKDGLAFNALIHRHRPELIEYDKLRKDDPVTNLNNAFEVAEKYLDIPKMLDAEDIVNTARPDEKAIMTYVSSFYHAFSGAQKAETAANRICKVLAVNQENEHLMEDYEKLASDLLEWIRRTIPWLEDRVPQKTIQEMQQKLEDFRDYRRVHKPPKVQEKCQLEINFNTLQTKLRLSNRPAFMPSWRSRASSSPTSTCAASSPARPMLWGPGSRPRWRRSGASPLR

SEQ ID NO: 382 - protein, 562 aa, synthetic construct [sequence omitted]

SEQ ID NO: 383 - protein, 911 aa, synthetic construct
  REGION 1..911: note = alpha-actinin-_4/m__Homo_sapiens__O43707
MVDYHAANQSYQYGPSSAGNGAGGGGSMGDYMAQEDDWDRDLLLDPAWEKQQRKTFTAWCNSHLRKAGTQIENIDEDFRDGLKLMLLLEVISGERLPKPERGKMRVHKINNVNKALDFIASKGVKLVSIGAEEIVDGNAKMTLGMIWTIILRFAIQDISVEETSAKEGLLLWCQRKTAPYKNVNVQNFHISWKDGLAFNALIHRHRPELIEYDKLRKDDPVTNLNNAFEVAEKYLDIPKMLDAEDIVNTARPDEKAIMTYVSSFYHAFSGAQKAETAANRICKVLAVNQENEHLMEDYEKLASDLLEWIRRTIPWLEDRVPQKTIQEMQQKLEDFRDYRRVHKPPKVQEKCQLEINFNTLQTKLRLSNRPAFMPSEGKMVSDINNGWQHLEQAEKGYEEWLLNEIRRLERLDHLAEKFRQKASIHEAWTDGKEAMLKHRDYETATLSDIKALIRKHEAFESDLAAHQDRVEQIAAIAQELNELDYYDSHNVNTRCQKICDQWDALGSLTHSRREALEKTEKQLEAIDQLHLEYAKRAAPFNNWMESAMEDLQDMFIVHTIEEIEGLISAHDQFKSTLPDADREREAILAIHKEAQRIAESNHIKLSGSNPYTTVTPQIINSKWEKVQQLVPKRDHALLEEQSKQQSNEHLRRQFASQANVVGPWIQTKMEEIGRISIEMNGTLEDQLSHLKQYERSIVDYKPNLDLLEQQHQLIQEALIFDNKHTNYTMEHIRVGWEQLLTTIARTINEVENQILTRDAKGISQEQMQEFRASFNHFDKDHGGALGPEEFKACLISLGYDVENDRQGEAEFNRIMSLVDPNHSGLVTFQAFIDFMSRETTDTDTADQVIASFKVLAGDKNFITAEELRRELPPDQAEYCIARMAPYQGPDAVPGALDYKSFSTALYGESDL

SEQ ID NO: 384 - protein, 198 aa, synthetic construct [sequence omitted]

SEQ ID NO: 385 - protein, 198 aa, synthetic construct [sequence omitted]

SEQ ID NO: 386 - protein, 920 aa, synthetic construct
  REGION 1..920: note = ANDR__Homo_sapiens__P10275
MEVQLGLGRVYPRPPSKTYRGAFQNLFQSVREVIQNPGPRHPEAASAAPPGASLLLLQQQQQQQQQQQQQQQQQQQQQQQETSPRQQQQQQGEDGSPQAHRRGPTGYLVLDEEQQPSQPQSALECHPERGCVPEPGAAVAASKGLPQQLPAPPDEDDSAAPSTLSLLGPTFPGLSSCSADLKDILSEASTMQLLQQQQQEAVSEGSSSGRAREASGAPTSSKDNYLGGTSTISDNAKELCKAVSVSMGLGVEALEHLSPGEQLRGDCMYAPLLGVPPAVRPTPCAPLAECKGSLLDDSAGKSTEDTAEYSPFKGGYTKGLEGESLGCSGSAAAGSSGTLELPSTLSLYKSGALDEAAAYQSRDYYNFPLALAGPPPPPPPPHPHARIKLENPLDYGSAWAAAAAQCRYGDLASLHGAGAAGPGSGSPSAAASSSWHTLFTAEEGQLYGPCGGGGGGGGGGGGGGGGGGGGGGGEAGAVAPYGYTRPPQGLAGQESDFTAPDVWYPGGMVSRVPYPSPTCVKSEMGPWMDSYSGPYGDMRLETARDHVLPIDYYFPPQKTCLICGDEASGCHYGALTCGSCKVFFKRAAEGKQKYLCASRNDCTIDKFRRKNCPSCRLRKCYEAGMTLGARKLKKLGNLKLQEEGEASSTTSPTEETTQKLTVSHIEGYECQPIFLNVLEAIEPGVVCAGHDNNQPDSFAALLSSLNELGERQLVHVVKWAKALPGFRNLHVDDQMAVIQYSWMGLMVFAMGWRSFTNVNSRMLYFAPDLVFNEYRMHKSRMYSQCVRMRHLSQEFGWLQITPQEFLCMKALLLFSIIPVDGLKNQKFFDELRMNYIKELDRIIACKRKNPTSCSRRFYQLTKLLDSVQPIARELHQFTFDLLIKSHMVSVDFPEMMAEIISVQVPKILSGKVKPIYFHTQ

SEQ ID NO: 387 - protein, 412 aa, synthetic construct [sequence omitted]

SEQ ID NO: 388 - protein, 327 aa, synthetic construct
  REGION 1..327: note = ARTC1/m__Homo_sapiens__P52961
MQMPAMMSLLLVSVGLMEALQAQSHPITRRDLFSQEIQLDMALASFDDQYAGCAAAMTAALPDLNHTEFQANQVYADSWTLASSQWQERQARWPEWSLSPTRPSPPPLGFRDEHGVALLAYTANSPLHKEFNAAVREAGRSRAHYLHHFSFKTLHFLLTEALQLLGSGQRPPRCHQVFRGVHGLRFRPAGPRATVRLGGFASASLKHVAAQQFGEDTFFGIWTCLGAPIKGYSFFPGEEEVLIPPFETFQVINASRLAQGPARIYLRALGKHSTYNCEYIKDKKCKSGPCHLDNSAMGQSPLSAVWSLLLLLWFLVVRAFPDGPGLL

SEQ ID NO: 389 - protein, 344 aa, synthetic construct
  REGION 1..344: note = AURKB__Homo_sapiens__Q96GD4
MAQKENSYPWPYGRQTAPSGLSTLPQRVLRKEPVTPSALVLMSRSNVQPTAAPGQKVMENSSGTPDILTRHFTIDDFEIGRPLGKGKFGNVYLAREKKSHFIVALKVLFKSQIEKEGVEHQLRREIEIQAHLHHPNILRLYNYFYDRRRIYLILEYAPRGELYKELQKSCTFDEQRTATIMEELADALMYCHGKKVIHRDIKPENLLLGLKGELKIADFGWSVHAPSLRRKTMCGTLDYLPPEMIEGRMHNEKVDLWCIGVLCYELLVGNPPFESASHNETYRRIVKVDLKFPASVPMGAQDLISKLLRHNPSERLPLAQVSAHPWVRANSRRVLPPSALQSVA

SEQ ID NO: 390 - protein, 119 aa, synthetic construct
  REGION 1..119: note = B2MG__Homo_sapiens__P61769
MSRSVALAVLALLSLSGLEAIQRTPKIQVYSRHPAENGKSNFLNCYVSGFHPSDIEVDLLKNGERIEKVEHSDLSFSKDWSFYLLYYTEFTPTEKDEYACRVNHVTLSQPKIVKWDRDM

SEQ ID NO: 391 - protein, 378 aa, synthetic construct
  REGION 1..378: note = B3GN5__Homo_sapiens__Q9BYG0
MRMLVSGRRVKKWQLIIQLFATCFLASLMFFWEPIDNHIVSHMKSYSYRYLINSYDFVNDTLSLKHTSAGPRYQYLINHKEKCQAQDVLLLLFVKTAPENYDRRSGIRRTWGNENYVRSQLNANIKTLFALGTPNPLEGEELQRKLAWEDQRYNDIIQQDFVDSFYNLTLKLLMQFSWANTYCPHAKFLMTADDDIFIHMPNLIEYLQSLEQIGVQDFWIGRVHRGAPPIRDKSSKYYVSYEMYQWPAYPDYTAGAAYVISGDVAAKVYEASQTLNSSLYIDDVFMGLCANKIGIVPQDHVFFSGEGKTPYHPCIYEKMMTSHGHLEDLQDLWKNATDPKVKTISKGFFGQIYCRLMKIILLCKISYVDTYPCRAAFI

SEQ ID NO: 392 - protein, 533 aa, synthetic construct
  REGION 1..533: note = B4GN1__Homo_sapiens__Q00973
MWLGRRALCALVLLLACASLGLLYASTRDAPGLRLPLAPWAPPQSPRRPELPDLAPEPRYAHIPVRIKEQVVGLLAWNNCSCESSGGGLPLPFQKQVRAIDLTKAFDPAELRAASATREQEFQAFLSRSQSPADQLLIAPANSPLQYPLQGVEVQPLRSILVPGLSLQAASGQEVYQVNLTASLGTWDVAGEVTGVTLTGEGQADLTLVSPGLDQLNRQLQLVTYSSRSYQTNTADTVRFSTEGHEAAFTIRIRHPPNPRLYPPGSLPQGAQYNISALVTIATKTFLRYDRLRALITSIRRFYPTVTVVIADDSDKPERVSGPYVEHYLMPFGKGWFAGRNLAVSQVTTKYVLWVDDDFVFTARTRLERLVDVLERTPLDLVGGAVREISGFATTYRQLLSVEPGAPGLGNCLRQRRGFHHELVGFPGCVVTDGVVNFFLARTDKVREVGFDPRLSRVAHLEFFLDGLGSLRVGSCSDVVVDHASKLKLPWTSRDAGAETYARYRYPGSLDESQMAKHRLLFFKHRLQCMTSQ

SEQ ID NO: 393 - protein, 282 aa, synthetic construct
  REGION 1..282: note = B7H4__Homo_sapiens__Q7Z7D3
MASLGQILFWSIISIIIILAGAIALIIGFGISGRHSITVTTVASAGNIGEDGILSCTFEPDIKLSDIVIQWLKEGVLGLVHEFKEGKDELSEQDEMFRGRTAVFADQVIVGNASLRLKNVQLTDAGTYKCYIITSKGKGNANLEYKTGAFSMPEVNVDYNASSETLRCEAPRWFPQPTVVWASQVDQGANFSEVSNTSFELNSENVTMKVVSVLYNVTINNTYSCMIENDIAKATGDIKVTESEIKRRSHLQLLNSKASLCVSSFFAISWALLPLSPYLMLK

SEQ ID NO: 394 - protein, 43 aa, synthetic construct
  REGION 1..43: note = BAGE-1__Homo_sapiens__Q13072
MAARAVFLALSAQLLQARLMKEESPVVSWRLEPEDGTALCFIF

SEQ ID NO: 395 - protein, 385 aa, synthetic construct
  REGION 1..385: note = BASI__Homo_sapiens__P35613
MAAALFVLLGFALLGTHGASGAAGFVQAPLSQQRWVGGSVELHCEAVGSPVPEIQWWFEGQGPNDTCSQLWDGARLDRVHIHATYHQHAASTISIDTLVEEDTGTYECRASNDPDRNHLTRAPRVKWVRAQAVVLVLEPGTVFTTVEDLGSKILLTCSLNDSATEVTGHRWLKGGVVLKEDALPGQKTEFKVDSDDQWGEYSCVFLPEPMGTANIQLHGPPRVKAVKSSEHINEGETAMLVCKSESVPPVTDWAWYKITDSEDKALMNGSESRFFVSSSQGRSELHIENLNMEADPGQYRCNGTSSKGSDQAIITLRVRSHLAALWPFLGIVAEVLVLVTIIFIYEKRRKPEDVLDDDDAGSAPLKSSGQHQNDKGKNVRQRNSS

SEQ ID NO: 396 - protein, 239 aa, synthetic construct [sequence omitted]

SEQ ID NO: 397 - protein, 429 aa, synthetic construct [sequence omitted]

SEQ ID NO: 398 - protein, 554 aa, synthetic construct [sequence omitted]

SEQ ID NO: 399 - protein, 514 aa, synthetic construct [sequence omitted]

SEQ ID NO: 400 - protein, 441 aa, synthetic construct
  REGION 1..441: note = bcr/abl__Homo_sapiens__A9UEZ9
MVDPVGFAEAWKAQFPDSEPPRMELRSVGDIEQELERCKASIRRLEQEVNQERFRMIYLQTLLAKEKKSYDRQRWGFRRAAQAPDGASEPRASASRPQPAPADGADPPPAEEPEARPDGEGSPGKARPGTARRPGAAASGERDDRGPPASVAALRSNFERIRKGHGQPGADAEKPFYVNVEFHHERGLVKVNDKEVSDRISSLGSQAMQMERKKSQHGAGSSVGDASRPPYRGRSSESSCGVDGDYEDAELNPRFLKDNLIDANGGSRPPWPPLEYQPYQSIYVGGMMEGEGKGPLLRSQSTSEQEKRLTWPRRSYSPRSFEDCGGGYTPDCSSNENLTSSEEDFSSGQSSRVSPSPTTYRMFRDKSRSPSQNSQQSFDSSSPPTPQCHKRHRHCPVVVSEATIVGVRKTGQIWPNDGEGAFHGDADGSLELQGKPSRWTQ

SEQ ID NO: 401 - protein, 524 aa, synthetic construct
  REGION 1..524: note = bcr/abl__Homo_sapiens__A9UF00
MVDPVGFAEAWKAQFPDSEPPRMELRSVGDIEQELERCKASIRRLEQEVNQERFRMIYLQTLLAKEKKSYDRQRWGFRRAAQAPDGASEPRASASRPQPAPADGADPPPAEEPEARPDGEGSPGKARPGTARRPGAAASGERDDRGPPASVAALRSNFERIRKGHGQPGADAEKPFYVNVEFHHERGLVKVNDKEVSDRISSLGSQAMQMERKKSQHGAGSSVGDASRPPYRGRSSESSCGVDGDYEDAELNPRFLKDNLIDANGGSRPPWPPLEYQPYQSIYVGGMMEGEGKGPLLRSQSTSEQEKRLTWPRRSYSPRSFEDCGGGYTPDCSSNENLTSSEEDFSSGQSSRVSPSPTTYRMFRDKSRSPSQNSQQSFDSSSPPTPQCHKRHRHCPVVVSEATIVGVRKTGQIWPNDGEGAFHGDADGSFGTPPGYGCAADRAEEQRRHQDGLPYIDDSPSSSPHLSSKGRGSRDALVSGALESTKASELDLEKGLEMRKWDPVKMTPTFSLHCMILWPVEITL

SEQ ID NO: 402 - protein, 465 aa, synthetic construct
  REGION 1..465: note = bcr/abl__Homo_sapiens__A9UF01
MVDPVGFAEAWKAQFPDSEPPRMELRSVGDIEQELERCKASIRRLEQEVNQERFRMIYLQTLLAKEKKSYDRQRWGFRRAAQAPDGASEPRASASRPQPAPADGADPPPAEEPEARPDGEGSPGKARPGTARRPGAAASGERDDRGPPASVAALRSNFERIRKGHGQPGADAEKPFYVNVEFHHERGLVKVNDKEVSDRISSLGSQAMQMERKKSQHGAGSSVGDASRPPYRGRSSESSCGVDGDYEDAELNPRFLKDNLIDANGGSRPPWPPLEYQPYQSIYVGGMMEGEGKGPLLRSQSTSEQEKRLTWPRRSYSPRSFEDCGGGYTPDCSSNENLTSSEEDFSSGQSSRVSPSPTTYRMFRDKSRSPSQNSQQSFDSSSPPTPQCHKRHRHCPVVVSEATIVGVRKTGQIWPNDGEGAFHGEHPGAAEEVFQKLLPDIRGAADADQLVCETPDCPQHSADHQ

SEQ ID NO: 403 - protein, 458 aa, synthetic construct
  REGION 1..458: note = bcr/abl__Homo_sapiens__A9UF03
MVDPVGFAEAWKAQFPDSEPPRMELRSVGDIEQELERCKASIRRLEQEVNQERFRMIYLQTLLAKEKKSYDRQRWGFRRAAQAPDGASEPRASASRPQPAPADGADPPPAEEPEARPDGEGSPGKARPGTARRPGAAASGERDDRGPPASVAALRSNFERIRKGHGQPGADAEKPFYVNVEFHHERGLVKVNDKEVSDRISSLGSQAMQMERKKSQHGAGSSVGDASRPPYRGRSSESSCGVDGDYEDAELNPRFLKDNLIDANGGSRPPWPPLEYQPYQSIYVGGMMEGEGKGPLLRSQSTSEQEKRLTWPRRSYSPRSFEDCGGGYTPDCSSNENLTSSEEDFSSGQSSRVSPSPTTYRMFRDKSRSPSQNSQQSFDSSSPPTPQCHKRHRHCPVVVSEATIVGVRKTGQIWPNDGEGAFHGDADGSFGTPPGYCCLCLPAWPSGCTAATARVTRS

SEQ ID NO: 404 - protein, 454 aa, synthetic construct
  REGION 1..454: note = bcr/abl__Homo_sapiens__A9UF04
MVDPVGFAEAWKAQFPDSEPPRMELRSVGDIEQELERCKASIRRLEQEVNQERFRMIYLQTLLAKEKKSYDRQRWGFRRAAQAPDGASEPRASASRPQPAPADGADPPPAEEPEARPDGEGSPGKARPGTARRPGAAASGERDDRGPPASVAALRSNFERIRKGHGQPGADAEKPFYVNVEFHHERGLVKVNDKEVSDRISSLGSQAMQMERKKSQHGAGSSVGDASRPPYRGRSSESSCGVDGDYEDAELNPRFLKDNLIDANGGSRPPWPPLEYQPYQSIYVGGMMEGEGKGPLLRSQSTSEQEKRLTWPRRSYSPRSFEDCGGGYTPDCSSNENLTSSEEDFSSGQSSRVSPSPTTYRMFRDKSRSPSQNSQQSFDSSSPPTPQCHKRHRHCPVVVSEATIVGVRKTGQIWPNDGEGAFHGDADGSFGTPPGYGCAAGRPPHLTELPVQHQ

SEQ ID NO: 405 - protein, 467 aa, synthetic construct
  REGION 1..467: note = bcr/abl__Homo_sapiens__A9UF05
MVDPVGFAEAWKAQFPDSEPPRMELRSVGDIEQELERCKASIRRLEQEVNQERFRMIYLQTLLAKEKKSYDRQRWGFRRAAQAPDGASEPRASASRPQPAPADGADPPPAEEPEARPDGEGSPGKARPGTARRPGAAASGERDDRGPPASVAALRSNFERIRKGHGQPGADAEKPFYVNVEFHHERGLVKVNDKEVSDRISSLGSQAMQMERKKSQHGAGSSVGDASRPPYRGRSSESSCGVDGDYEDAELNPRFLKDNLIDANGGSRPPWPPLEYQPYQSIYVGGMMEGEGKGPLLRSQSTSEQEKRLTWPRRSYSPRSFEDCGGGYTPDCSSNENLTSSEEDFSSGQSSRVSPSPTTYRMFRDKSRSPSQNSQQSFDSSSPPTPQCHKRHRHCPVVVSEATIVGVRKTGQIWPNDGEGAFHGDAVLKTEVPHQGVRRARLSLEALGEDPSFLFPASDGPRHSSTW

SEQ ID NO: 406 - protein, 513 aa, synthetic construct
  REGION 1..513: note = bcr/abl__Homo_sapiens__A9UF06
MVDPVGFAEAWKAQFPDSEPPRMELRSVGDIEQELERCKASIRRLEQEVNQERFRMIYLQTLLAKEKKSYDRQRWGFRRAAQAPDGASEPRASASRPQPAPADGADPPPAEEPEARPDGEGSPGKARPGTARRPGAAASGERDDRGPPASVAALRSNFERIRKGHGQPGADAEKPFYVNVEFHHERGLVKVNDKEVSDRISSLGSQAMQMERKKSQHGAGSSVGDASRPPYRGRSSESSCGVDGDYEDAELNPRFLKDNLIDANGGSRPPWPPLEYQPYQSIYVGGMMEGEGKGPLLRSQSTSEQEKRLTWPRRSYSPRSFEDCGGGYTPDCSSNENLTSSEEDFSSGQSSRVSPSPTTYRMFRDKSRSPSQNSQQSFDSSSPPTPQCHKRHRHCPVVVSEATIVGVRKTGQIWPNDGEGAFHGDADGSFGTPPGYGCAADRAEEQRRHQDGLPYIDDSPSSSPHLSSKGRGSRDALVSGALESTKASELDPVKMTPTFSLHCMILWPVEITL

SEQ ID NO: 407 - protein, 406 aa, synthetic construct [sequence omitted]

SEQ ID NO: 408 - protein, 781 aa, synthetic construct
  REGION 1..781: note = beta-catenin/m__Homo_sapiens__P35222
MATQADLMELDMAMEPDRKAAVSHWQQQSYLDSGIHSGATTTAPSLSGKGNPEEEDVDTSQVLYEWEQGFSQSFTQEQVADIDGQYAMTRAQRVRAAMFPETLDEGMQIPSTQFDAAHPTNVQRLAEPSQMLKHAVVNLINYQDDAELATRAIPELTKLLNDEDQVVVNKAAVMVHQLSKKEASRHAIMRSPQMVSAIVRTMQNTNDVETARCTAGTLHNLSHHREGLLAIFKSGGIPALVKMLGSPVDSVLFYAITTLHNLLLHQEGAKMAVRLAGGLQKMVALLNKTNVKFLAITTDCLQILAYGNQESKLIILASGGPQALVNIMRTYTYEKLLWTTSRVLKVLSVCSSNKPAIVEAGGMQALGLHLTDPSQRLVQNCLWTLRNLSDAATKQEGMEGLLGTLVQLLGSDDINVVTCAAGILSNLTCNNYKNKMMVCQVGGIEALVRTVLRAGDREDITEPAICALRHLTSRHQEAEMAQNAVRLHYGLPVVVKLLHPPSHWPLIKATVGLIRNLALCPANHAPLREQGAIPRLVQLLVRAHQDTQRRTSMGGTQQQFVEGVRMEEIVEGCTGALHILARDVHNRIVIRGLNTIPLFVQLLYSPIENIQRVAAGVLCELAQDKEAAEAIEAEGATAPLTELLHSRNEGVATYAAAVLFRMSEDKPQDYKKRLSVELTSSLFRTEPMAWNETADLGLDIGAQGEPLGYRQDDPSYRSFHSGGYGQDALGMDPMMEHEMGGHHPGADYPVDGLPDLGHAQDLMDGLPPGDSNQLAWFDTDL

SEQ ID NO: 409 - protein, 563 aa, synthetic construct
  REGION 1..563: note = beta-catenin/m__Homo_sapiens__Q8WYA6
MDVGELLSYQPNRGTKRPRDDEEEEQKMRRKQTGTRERGRYREEEMTVVEEADDDKKRLLQIIDRDGEEEEEEEEPLDESSVKKMILTFEKRSYKNQELRIKFPDNPEKFMESELDLNDIIQEMHVVATMPDLYHLLVELNAVQSLLGLLGHDNTDVSIAVVDLLQELTDIDTLHESEEGAEVLIDALVDGQVVALLVQNLERLDESVKEEADGVHNTLAIVENMAEFRPEMCTEGAQQGLLQWLLKRLKAKMPFDANKLYCSEVLAILLQDNDENRELLGELDGIDVLLQQLSVFKRHNPSTAEEQEMMENLFDSLCSCLMLSSNRERFLKGEGLQLMNLMLREKKISRSSALKVLDHAMIGPEGTDNCHKFVDILGLRTIFPLFMKSPRKIKKVGTTEKEHEEHVCSILASLLRNLRGQQRTRLLNKFTENDSEKVDRLMELHFKYLGAMQVADKKIEGEKHDMVRRGEIIDNDTEEEFYLRRLDAGLFVLQHICYIMAEICNANVPQIRQRVHQILNMRGSSIKIVRHIIKEYAENIGDGRSPEFRENEQKRILGLLENF

SEQ ID NO: 410 - protein, 610 aa, synthetic construct
  REGION 1..610: note = BING-4__Homo_sapiens__O15213
METAPKPGKDVPPKKDKLQTKRKKPRRYWEEETVPTTAGASPGPPRNKKNRELRPQRPKNAYILKKSRISKKPQVPKKPREWKNPESQRGLSGTQDPFPGPAPVPVEVVQKFCRIDKSRKLPHSKAKTRSRLEVAEAEEEETSIKAARSELLLAEEPGFLEGEDGEDTAKICQADIVEAVDIASAAKHFDLNLRQFGPYRLNYSRTGRHLAFGGRRGHVAALDWVTKKLMCEINVMEAVRDIRFLHSEALLAVAQNRWLHIYDNQGIELHCIRRCDRVTRLEFLPFHFLLATASETGFLTYLDVSVGKIVAALNARAGRLDVMSQNPYNAVIHLGHSNGTVSLWSPAMKEPLAKILCHRGGVRAVAVDSTGTYMATSGLDHQLKIFDLRGTYQPLSTRTLPHGAGHLAFSQRGLLVAGMGDVVNIWAGQGKASPPSLEQPYLTHRLSGPVHGLQFCPFEDVLGVGHTGGITSMLVPGAGEPNFDGLESNPYRSRKQRQEWEVKALLEKVPAELICLDPRALAEVDVISLEQGKKEQIERLGYDPQAKAPFQPKPKQKGRSSTASLVKRKRKVMDEEHRDKVRQSLQQQHHKEAKAKPTGARPSALDRFVR

SEQ ID NO: 411 - protein, 298 aa, synthetic construct
  REGION 1..298: note = BIRC7__Homo_sapiens__Q96CA5
MGPKDSAKCLHRGPQPSHWAAGDGPTQERCGPRSLGSPVLGLDTCRAWDHVDGQILGQLRPLTEEEEEEGAGATLSRGPAFPGMGSEELRLASFYDWPLTAEVPPELLAAAGFFHTGHQDKVRCFFCYGGLQSWKRGDDPWTEHAKWFPSCQFLLRSKGRDFVHSVQETHSQLLGSWDPWEEPEDAAPVAPSVPASGYPELPTPRREVQSESAQEPGGVSPAEAQRAWWVLEPPGARDVEAQLRRLQEERTCKVCLDRAVSIVFVPCGHLVCAECAPGLQLCPICRAPVRSRVRTFLS

SEQ ID NO: 412 - protein, 759 aa, synthetic construct
  REGION 1..759: note = BRCA1/m__Homo_sapiens__A0A024R1V0
MDLSALRVEEVQNVINAMQKILECPICLELIKEPVSTKCDHIFCKFCMLKLLNQKKGPSQCPLCKNDITKRSLQESTRFSQLVEELLKIICAFQLDTGLEYANSYNFAKKENNSPEHLKDEVSIIQSMGYRNRAKRLLQSEPENPSLQETSLSVQLSNLGTVRTLRTKQRIQPQKTSVYIELGSDSSEDTVNKATYCSVGDQELLQITPQGTRDEISLDSAKKAACEFSETDVTNTEHHQPSNNDLNTTEKRAAERHPEKYQGEAASGCESETSVSEDCSGLSSQSDILTTQQRDTMQHNLIKLQQEMAELEAVLEQHGSQPSNSYPSIISDSSALEDLRNPEQSTSEKVLTSQKSSEYPISQNPEGLSADKFEVSADSSTSKNKEPGVERSSPSKCPSLDDRWYMHSCSGSLQNRNYPSQEELIKVVDVEEQQLEESGPHDLTETSYLPRQDLEGTPYLESGISLFSDDPESDPSEDRAPESARVGNIPSSTSALKVPQLKVAESAQSPAAAHTTDTAGYNAMEESVSREKPELTASTERVNKRMSMVVSGLTPEEFMLVYKFARKHHITLTNLITEETTHVVMKTDAEFVCERTLKYFLGIAGGKWVVSYFWVTQSIKERKMLNEHDFEVRGDVVNGRNHQGPKRARESQDRKIFRGLEICCYGPFTNMPTDQLEWMVQLCGASVVKELSSFTLGTGVHPIVVVQPDAWTEDNGFHAIGQMCEAPVVTREWVLDSVALYQCQELDTYLIPQIPHSHY

SEQ ID NO: 413 - protein, 719 aa, synthetic construct
  REGION 1..719: note = BRCA1/m__Homo_sapiens__A0A024R1V7
MDLSALRVEEVQNVINAMQKILECPICLELIKEPVSTKCDHIFCKFCMLKLLNQKKGPSQCPLCKNDITKRSLQESTRFSQLVEELLKIICAFQLDTGLEYANSYNFAKKENNSPEHLKDEVSIIQSMGYRNRAKRLLQSEPENPSLQETSLSVQLSNLGTVRTLRTKQRIQPQKTSVYIELAACEFSETDVTNTEHHQPSNNDLNTTEKRAAERHPEKYQGEAASGCESETSVSEDCSGLSSQSDILTTQQRDTMQHNLIKLQQEMAELEAVLEQHGSQPSNSYPSIISDSSALEDLRNPEQSTSEKAVLTSQKSSEYPISQNPEGLSADKFEVSADSSTSKNKEPGVERSSPSKCPSLDDRWYMHSCSGSLQNRNYPSQEELIKVVDVEEQQLEESGPHDLTETSYLPRQDLEGTPYLESGISLFSDDPESDPSEDRAPESARVGNIPSSTSALKVPQLKVAESAQSPAAAHTTDTAGYNAMEESVSREKPELTASTERVNKRMSMVVSGLTPEEFMLVYKFARKHHITLTNLITEETTHVVMKTDAEFVCERTLKYFLGIAGGKWVVSYFWVTQSIKERKMLNEHDFEVRGDVVNGRNHQGPKRARESQDRKIFRGLEICCYGPFTNMPTDQLEWMVQLCGASVVKELSSFTLGTGVHPIVVVQPDAWTEDNGFHAIGQMCEAPVVTREWVLDSVALYQCQELDTYLIPQIPHSHY

SEQ ID NO: 414 - protein, 721 aa, synthetic construct
  REGION 1..721: note = BRCA1/m__Homo_sapiens__A0A024R1Z8
MDLSALRVEEVQNVINAMQKILECPICLELIKEPVSTKCDHIFCKFCMLKLLNQKKGPSQCPLCKNDITKRSLQESTRFSQLVEELLKIICAFQLDTGLEYANSYNFAKKENNSPEHLKDEVSIIQSMGYRNRAKRLLQSEPENPSLQETSLSVQLSNLGTVRTLRTKQRIQPQKTSVYIELGSDSSEDTVNKATYCSVGDQELLQITPQGTRDEISLDSAKKGEAASGCESETSVSEDCSGLSSQSDILTTQQRDTMQHNLIKLQQEMAELEAVLEQHGSQPSNSYPSIISDSSALEDLRNPEQSTSEKAVLTSQKSSEYPISQNPEGLSADKFEVSADSSTSKNKEPGVERSSPSKCPSLDDRWYMHSCSGSLQNRNYPSQEELIKVVDVEEQQLEESGPHDLTETSYLPRQDLEGTPYLESGISLFSDDPESDPSEDRAPESARVGNIPSSTSALKVPQLKVAESAQSPAAAHTTDTAGYNAMEESVSREKPELTASTERVNKRMSMVVSGLTPEEFMLVYKFARKHHITLTNLITEETTHVVMKTDAEFVCERTLKYFLGIAGGKWVVSYFWVTQSIKERKMLNEHDFEVRGDVVNGRNHQGPKRARESQDRKIFRGLEICCYGPFTNMPTDQLEWMVQLCGASVVKELSSFTLGTGVHPIVVVQPDAWTEDNGFHAIGQMCEAPVVTREWVLDSVALYQCQELDTYLIPQIPHSHY

SEQ ID NO: 415 - protein, 11 aa, synthetic construct
  REGION 1..11: note = BRCA1/m__Homo_sapiens__A0A068BFX7
MDLSALRVEEV

SEQ ID NO: 416 - protein, 173 aa, synthetic construct
  REGION 1..173: note = BRCA1/m__Homo_sapiens__C6YB45
MDAEFVCERTLKYFLGIAGGKWVVSYFWVTQSIKERKMLNEHDFEVRGDVVNGRNHQGPKRARESQDRKIFRGLEICCYGPFTNMPTDQLEWMVQLCGASVVKELSSFTLGTGVHPIVVVQPDAWTEDNGFHAIGQMCEAPVVTREWVLDSVALYQCQELDTYLIPQIPHSHY

SEQ ID NO: 417 - protein, 354 aa, synthetic construct [sequence omitted]

SEQ ID NO: 418 - protein, 680 aa, synthetic construct
  REGION 1..680: note = BRCA1/m__Homo_sapiens__G3XAC3
MDLSALRVEEVQNVINAMQKILECPICLELIKEPVSTKCDHIFCKFCMLKLLNQKKGPSQCPLCKNDITKRSLQESTRFSQLVEELLKIICAFQLDTGLEYANSYNFAKKENNSPEHLKDEVSIIQSMGYRNRAKRLLQSEPENPSLQETSLSVQLSNLGTVRTLRTKQRIQPQKTSVYIELGEAASGCESETSVSEDCSGLSSQSDILTTQQRDTMQHNLIKLQQEMAELEAVLEQHGSQPSNSYPSIISDSSALEDLRNPEQSTSEKAVLTSQKSSEYPISQNPEGLSADKFEVSADSSTSKNKEPGVERSSPSKCPSLDDRWYMHSCSGSLQNRNYPSQEELIKVVDVEEQQLEESGPHDLTETSYLPRQDLEGTPYLESGISLFSDDPESDPSEDRAPESARVGNIPSSTSALKVPQLKVAESAQSPAAAHTTDTAGYNAMEESVSREKPELTASTERVNKRMSMVVSGLTPEEFMLVYKFARKHHITLTNLITEETTHVVMKTDAEFVCERTLKYFLGIAGGKWVVSYFWVTQSIKERKMLNEHDFEVRGDVVNGRNHQGPKRARESQDRKIFRGLEICCYGPFTNMPTDQLEWMVQLCGASVVKELSSFTLGTGVHPIVVVQPDAWTEDNGFHAIGQMCEAPVVTREWVLDSVALYQCQELDTYLIPQIPHSHY

SEQ ID NO: 419 - protein, 181 aa, synthetic construct
  REGION 1..181: note = BY55__Homo_sapiens__O95971
MLLEPGRGCCALAILLAIVDIQSGGCINITSSASQEGTRLNLICTVWHKKEEAEGFVVFLCKDRSGDCSPETSLKQLRLKRDPGIDGVGEISSQLMFTISQVTPLHSGTYQCCARSQKSGIRLQGHFFSILFTETGNYTVTGLKQRQHLEFSHNEGTLSSGFLQEKVWVMLVTSLVALQAL

SEQ ID NO: 420 - protein, 109 aa, synthetic construct [sequence omitted]

SEQ ID NO: 421 - protein, 522 aa, synthetic construct
  REGION 1..522: note = CASPA__Homo_sapiens__Q92851-4
MKSQGQHWYSSSDKNCKVSFREKLLIIDSNLGVQDVENLKFLCIGLVPNKKLEKSSSASDVFEHLLAEDLLSEEDPFFLAELLYIIRQKKLLQHLNCTKEEVERLLPTRQRVSLFRNLLYELSEGIDSENLKDMIFLLKDSLPKTEMTSLSFLAFLEKQGKIDEDNLTCLEDLCKTVVPKLLRNIEKYKREKAIQIVTPPVDKEAESYQGEEELVSQTDVKTFLEALPQESWQNKHAGSNGNRATNGAPSLVSRGMQGASANTLNSETSTKRAAVYRMNRNHRGLCVIVNNHSFTSLKDRQGTHKDAEILSHVFQWLGFTVHIHNNVTKVEMEMVLQKQKCNPAHADGDCFVFCILTHGRFGAVYSSDEALIPIREIMSHFTALQCPRLAEKPKLFFIQACQGEEIQPSVSIEADALNPEQAPTSLQDSIPAEADFLLGLATVPGYVSFRHVEEGSWYIQSLCNHLKKLVPRHEDILSILTAVNDDVSRRVDKQGTKKQMPQPAFTLRKKLVFPVPLDALSL

SEQ ID NO: 422 - protein, 339 aa, synthetic construct
  REGION 1..339: note = cathepsin_B__Homo_sapiens__A0A024R374
MWQLWASLCCLLVLANARSRPSFHPLSDELVNYVNKRNTTWQAGHNFYNVDMSYLKRLCGTFLGGPKPPQRVMFTEDLKLPASFDAREQWPQCPTIKEIRDQGSCGSCWAFGAVEAISDRICIHTNAHVSVEVSAEDLLTCCGSMCGDGCNGGYPAEAWNFWTRKGLVSGGLYESHVGCRPYSIPPCEHHVNGSRPPCTGEGDTPKCSKICEPGYSPTYKQDKHYGYNSYSVSNSEKDIMAEIYKNGPVEGAFSVYSDFLLYKSGVYQHVTGEMMGGHAIRILGWGVENGTPYWLVANSWNTDWGDNGFFKILRGQDHCGIESEVVAGIPRTDQYWEKI

SEQ ID NO: 423 - protein, 339 aa, synthetic construct; identical to SEQ ID NO: 422
  REGION 1..339: note = cathepsin_B__Homo_sapiens__P07858

SEQ ID NO: 424 - protein, 333 aa, synthetic construct [sequence omitted]

SEQ ID NO: 425 - protein, 333 aa, synthetic construct [sequence omitted]

SEQ ID NO: 426 - protein, 151 aa, synthetic construct
  REGION 1..151: note = cathepsin_L__Homo_sapiens__Q9HBQ7
MDYAFQYVQDNGGLDSEESYPYEATEESCKYNPKYSVANDTGFVDIPKQEKALMKAVATVGPISVAIDAGHESFLFYKEGIYFEPDCSSEDMDHGVLVVGYGFESTESDNNKYWLVKNSWGEEWGMGGYVKMAKDRRNHCGIASAASYPTV

SEQ ID NO: 427 - protein, 327 aa, synthetic construct
  REGION 1..327: note = CD1A__Homo_sapiens__P06126
MLFLLLPLLAVLPGDGNADGLKEPLSFHVTWIASFYNHSWKQNLVSGWLSDLQTHTWDSNSSTIVFLCPWSRGNFSNEEWKELETLFRIRTIRSFEGIRRYAHELQFEYPFEIQVTGGCELHSGKVSGSFLQLAYQGSDFVSFQNNSWLPYPVAGNMAKHFCKVLNQNQHENDITHNLLSDTCPRFILGLLDAGKAHLQRQVKPEAWLSHGPSPGPGHLQLVCHVSGFYPKPVWVMWMRGEQEQQGTQRGDILPSADGTWYLRATLEVAAGEAADLSCRVKHSSLEGQDIVLYWEHHSSVGFIILAVIVPLLLLIGLALWFRKRCFC

SEQ ID NO: 428 - protein, 333 aa, synthetic construct
  REGION 1..333: note = CD1B__Homo_sapiens__P29016
MLLLPFQLLAVLFPGGNSEHAFQGPTSFHVIQTSSFTNSTWAQTQGSGWLDDLQIHGWDSDSGTAIFLKPWSKGNFSDKEVAELEEIFRVYIFGFAREVQDFAGDFQMKYPFEIQGIAGCELHSGGAIVSFLRGALGGLDFLSVKNASCVPSPEGGSRAQKFCALIIQYQGIMETVRILLYETCPRYLLGVLNAGKADLQRQVKPEAWLSSGPSPGPGRLQLVCHVSGFYPKPVWVMWMRGEQEQQGTQLGDILPNANWTWYLRATLDVADGEAAGLSCRVKHSSLEGQDIILYWRNPTSIGSIVLAIIVPSLLLLLCLALWYMRRRSYQNIP

SEQ ID NO: 429 - protein, 333 aa, synthetic construct
  REGION 1..333: note = CD1C__Homo_sapiens__P29017
MLFLQFLLLALLLPGGDNADASQEHVSFHVIQIFSFVNQSWARGQGSGWLDELQTHGWDSESGTIIFLHNWSKGNFSNEELSDLELLFRFYLFGLTREIQDHASQDYSKYPFEVQVKAGCELHSGKSPEGFFQVAFNGLDLLSFQNTTWVPSPGCGSLAQSVCHLLNHQYEGVTETVYNLIRSTCPRFLLGLLDAGKMYVHRQVRPEAWLSSRPSLGSGQLLLVCHASGFYPKPVWVTWMRNEQEQLGTKHGDILPNADGTWYLQVILEVASEEPAGLSCRVRHSSLGGQDIILYWGHHFSMNWIALVVIVPLVILIVLVLWFKKHCSYQDIL

SEQ ID NO: 430 - protein, 335 aa, synthetic construct
  REGION 1..335: note = CD1D__Homo_sapiens__P15813
MGCLLFLLLWALLQAWGSAEVPQRLFPLRCLQISSFANSSWTRTDGLAWLGELQTHSWSNDSDTVRSLKPWSQGTFSDQQWETLQHIFRVYRSSFTRDVKEFAKMLRLSYPLELQVSAGCEVHPGNASNNFFHVAFQGKDILSFQGTSWEPTQEAPLWVNLAIQVLNQDKWTRETVQWLLNGTCPQFVSGLLESGKSELKKQVKPKAWLSRGPSPGPGRLLLVCHVSGFYPKPVWVKWMRGEQEQQGTQPGDILPNADETWYLRATLDVVAGEAAGLSCRVKHSSLEGQDIVLYWGGSYTSMGLIALAVLACLLFLLIVGFTSRFKRQTSYQGVL

SEQ ID NO: 431 - protein, 388 aa, synthetic construct
  REGION 1..388: note = CD1E__Homo_sapiens__P15812
MLLLFLLFEGLCCPGENTAAPQALQSYHLAAEEQLSFRMLQTSSFANHSWAHSEGSGWLGDLQTHGWDTVLGTIRFLKPWSHGNFSKQELKNLQSLFQLYFHSFIQIVQASAGQFQLEYPFEIQILAGCRMNAPQIFLNMAYQGSDFLSFQGISWEPSPGAGIRAQNICKVLNRYLDIKEILQSLLGHTCPRFLAGLMEAGESELKRKVKPEAWLSCGPSPGPGRLQLVCHVSGFYPKPVWVMWMRGEQEQRGTQRGDVLPNADETWYLRATLDVAAGEAAGLSCRVKHSSLGGHDLIIHWGGYSIFLILICLTVIVTLVILVVVDSRLKKQSSNKNILSPHTPSPVFLMGANTQDTKNSRHQFCLAQVSWIKNRVLKKWKTRLNQLW

SEQ ID NO: 432 - protein, 297 aa, synthetic construct
  REGION 1..297: note = CD20__Homo_sapiens__P11836
MTTPRNSVNGTFPAEPMKGPIAMQSGPKPLFRRMSSLVGPTQSFFMRESKTLGAVQIMNGLFHIALGGLLMIPAGIYAPICVTVWYPLWGGIMYIISGSLLAATEKNSRKCLVKGKMIMNSLSLFAAISGMILSIMDILNIKISHFLKMESLNFIRAHTPYINIYNCEPANPSEKNSPSTQYCYSIQSLFLGILSVMLIFAFFQELVIAGIVENEWKRTCSRPKSNIVLLSAEEKKEQTIEIKEEVVGLTETSSQPKNEEDIEIIPIQEEEEEETETNFPEPPQDQESSPIENDSSP

SEQ ID NO: 433 - protein, 662 aa, synthetic construct [sequence omitted]

SEQ ID NO: 434 - protein, 847 aa, synthetic construct
  REGION 1..847: note = CD22__Homo_sapiens__P20273
MHLLGPWLLLLVLEYLAFSDSSKWVFEHPETLYAWEGACVWIPCTYRALDGDLESFILFHNPEYNKNTSKFDGTRLYESTKDGKVPSEQKRVQFLGDKNKNCTLSIHPVHLNDSGQLGLRMESKTEKWMERIHLNVSERPFPPHIQLPPEIQESQEVTLTCLLNFSCYGYPIQLQWLLEGVPMRQAAVTSTSLTIKSVFTRSELKFSPQWSHHGKIVTCQLQDADGKFLSNDTVQLNVKHTPKLEIKVTPSDAIVREGDSVTMTCEVSSSNPEYTTVSWLKDGTSLKKQNTFTLNLREVTKDQSGKYCCQVSNDVGPGRSEEVFLQVQYAPEPSTVQILHSPAVEGSQVEFLCMSLANPLPTNYTWYHNGKEMQGRTEEKVHIPKILPWHAGTYSCVAENILGTGQRGPGAELDVQYPPKKVTTVIQNPMPIREGDTVTLSCNYNSSNPSVTRYEWKPHGAWEEPSLGVLKIQNVGWDNTTIACAACNSWCSWASPVALNVQYAPRDVRVRKIKPLSEIHSGNSVSLQCDFSSSHPKEVQFFWEKNGRLLGKESQLNFDSISPEDAGSYSCWVNNSIGQTASKAWTLEVLYAPRRLRVSMSPGDQVMEGKSATLTCESDANPPVSHYTWFDWNNQSLPYHSQKLRLEPVKVQHSGAYWCQGTNSVGKGRSPLSTLTVYYSPETIGRRVAVGLGSCLAILILAICGLKLQRRWKRTQSQQGLQENSSGQSFFVRNKKVRRAPLSEGPHSLGCYNPMMEDGISYTTLRFPEMNIPRTGDAESSEMQRPPPDCDDTVTYSALHKRQVGDYENVIPDFPEDEGIHYSELIQFGVGERPQAQENVDYVILKH

SEQ ID NO: 435 - protein, 847 aa, synthetic construct; identical to SEQ ID NO: 434
  REGION 1..847: note = CD22__Homo_sapiens__Q0EAF5

SEQ ID NO: 436 - protein, 534 aa, synthetic construct
  REGION 1..534: note = CD276__Homo_sapiens__Q5ZPR3
MLRRRGSPGMGVHVGAALGALWFCLTGALEVQVPEDPVVALVGTDATLCCSFSPEPGFSLAQLNLIWQLTDTKQLVHSFAEGQDQGSAYANRTALFPDLLAQGNASLRLQRVRVADEGSFTCFVSIRDFGSAAVSLQVAAPYSKPSMTLEPNKDLRPGDTVTITCSSYQGYPEAEVFWQDGQGVPLTGNVTTSQMANEQGLFDVHSILRVVLGANGTYSCLVRNPVLQQDAHSSVTITPQRSPTGAVEVQVPEDPVVALVGTDATLRCSFSPEPGFSLAQLNLIWQLTDTKQLVHSFTEGRDQGSAYANRTALFPDLLAQGNASLRLQRVRVADEGSFTCFVSIRDFGSAAVSLQVAAPYSKPSMTLEPNKDLRPGDTVTITCSSYRGYPEAEVFWQDGQGVPLTGNVTTSQMANEQGLFDVHSVLRVVLGANGTYSCLVRNPVLQQDAHGSVTITGQPMTFPPEALWVTVGLSVCLIALLVALAFVCWRKIKQSCEEENAGAEDQDGEGEGSKTALQPLKHSDSKEDDGQEIA

SEQ ID NO: 437 - protein, 212 aa, synthetic construct
  REGION 1..212: note = CD33__Homo_sapiens__B4DF51
MPLLLLLPLLWADLTHRPKILIPGTLEPGHSKNLTCSVSWACEQGTPPIFSWLSAAPTSLGPRTTHSSVLIITPRPQDHGTNLTCQVKFAGAGVTTERTIQLNVTYVPQNPTTGIFPGDGSGKQETRAGVVHGAIGGAGVTALLALCLCLIFFIVKTHRRKAARTAVGRNDTHPTTGSASPVSDGASWHPVCPADTSSQCGPPSCPIQHFQN

SEQ ID NO: 438 - protein, 364 aa, synthetic construct
  REGION 1..364: note = CD33__Homo_sapiens__P20138
MPLLLLLPLLWAGALAMDPNFWLQVQESVTVQEGLCVLVPCTFFHPIPYYDKNSPVHGYWFREGAIISRDSPVATNKLDQEVQEETQGRFRLLGDPSRNNCSLSIVDARRRDNGSYFFRMERGSTKYSYKSPQLSVHVTDLTHRPKILIPGTLEPGHSKNLTCSVSWACEQGTPPIFSWLSAAPTSLGPRTTHSSVLIITPRPQDHGTNLTCQVKFAGAGVTTERTIQLNVTYVPQNPTTGIFPGDGSGKQETRAGVVHGAIGGAGVTALLALCLCLIFFIVKTHRRKAARTAVGRNDTHPTTGSASPKHQKKSKLHGPTETSSCSGAAPTVEMDEELHYASLNFHGMNPSKDTSTEYSEVRTQ

SEQ ID NO: 439 - protein, 364 aa, synthetic construct; identical to SEQ ID NO: 438
  REGION 1..364: note = CD33__Homo_sapiens__Q546G0

SEQ ID NO: 440 - protein, 207 aa, synthetic construct
  REGION 1..207: note = CD3E__Homo_sapiens__P07766
MQSGTHWRVLGLCLLSVGVWGQDGNEEMGGITQTPYKVSISGTTVILTCPQYPGSEILWQHNDKNIGGDEDDKNIGSDEDHLSLKEFSELEQSGYYVCYPRGSKPEDANFYLYLRARVCENCMEMDVMSVATIVIVDICITGGLLLLVYYWSKNRKAKAKPVTRGAGAGGRQRGQNKERPPPVPNPDYEPIRKGQRDLYSGLNQRRI

SEQ ID NO: 441 - protein, 164 aa, synthetic construct
  REGION 1..164: note = CD3Z__Homo_sapiens__P20963
MKWKALFTAAILQAQLPITEAQSFGLLDPKLCYLLDGILFIYGVILTALFLRVKFSRSADAPAYQQGQNQLYNELNLGRREEYDVLDKRRGRDPEMGGKPQRRKNPQEGLYNELQKDKMAEAYSEIGMKGERRRGKGHDGLYQGLSTATKDTYDALHMQALPPR

SEQ ID NO: 442 - protein, 742 aa, synthetic construct
  REGION 1..742: note = CD44_Isoform_1__Homo_sapiens__P16070
MDKFWWHAAWGLCLVPLSLAQIDLNITCRFAGVFHVEKNGRYSISRTEAADLCKAFNSTLPTMAQMEKALSIGFETCRYGFIEGHVVIPRIHPNSICAANNTGVYILTSNTSQYDTYCFNASAPPEEDCTSVTDLPNAFDGPITITIVNRDGTRYVQKGEYRTNPEDIYPSNPTDDDVSSGSSSERSSTSGGYIFYTFSTVHPIPDEDSPWITDSTDRIPATTLMSTSATATETATKRQETWDWFSWLFLPSESKNHLHTTTQMAGTSSNTISAGWEPNEENEDERDRHLSFSGSGIDDDEDFISSTISTTPRAFDHTKQNQDWTQWNPSHSNPEVLLQTTTRMTDVDRNGTTAYEGNWNPEAHPPLIHHEHHEEEETPHSTSTIQATPSSTTEETATQKEQWFGNRWHEGYRQTPKEDSHSTTGTAAASAHTSHPMQGRTTPSPEDSSWTDFFNPISHPMGRGHQAGRRMDMDSSHSITLQPTANPNTGLVEDLDRTGPLSMTTQQSNSQSFSTSHEGLEEDKDHPTTSTLTSSNRNDVTGGRRDPNHSEGSTTLLEGYTSHYPHTKESRTFIPVTSAKTGSFGVTAVTVGDSNSNVNRSLSGDQDTFHPSGGSHTTHGSESDGHSHGSQEGGANTTSGPIRTPQIPEWLIILASLLALALILAVCIAVNSRRRCGQKKKLVINSGNGAVEDRKPSGLNGEASKSQEMVHLVNKESSETPDQFMTADETRNLQNVDMKIGV

SEQ ID NO: 443 - protein, 699 aa, synthetic construct
  REGION 1..699: note = CD44_Isoform_6__Homo_sapiens__P16070-6
MDKFWWHAAWGLCLVPLSLAQIDLNITCRFAGVFHVEKNGRYSISRTEAADLCKAFNSTLPTMAQMEKALSIGFETCRYGFIEGHVVIPRIHPNSICAANNTGVYILTSNTSQYDTYCFNASAPPEEDCTSVTDLPNAFDGPITITIVNRDGTRYVQKGEYRTNPEDIYPSNPTDDDVSSGSSSERSSTSGGYIFYTFSTVHPIPDEDSPWITDSTDRIPATTLMSTSATATETATKRQETWDWFSWLFLPSESKNHLHTTTQMAGTSSNTISAGWEPNEENEDERDRHLSFSGSGIDDDEDFISSTISTTPRAFDHTKQNQDWTQWNPSHSNPEVLLQTTTRMTDVDRNGTTAYEGNWNPEAHPPLIHHEHHEEEETPHSTSTTASAHTSHPMQGRTTPSPEDSSWTDFFNPISHPMGRGHQAGRRMDMDSSHSITLQPTANPNTGLVEDLDRTGPLSMTTQQSNSQSFSTSHEGLEEDKDHPTTSTLTSSNRNDVTGGRRDPNHSEGSTTLLEGYTSHYPHTKESRTFIPVTSAKTGSFGVTAVTVGDSNSNVNRSLSGDQDTFHPSGGSHTTHGSESDGHSHGSQEGGANTTSGPIRTPQIPEWLIILASLLALALILAVCIAVNSRRRCGQKKKLVINSGNGAVEDRKPSGLNGEASKSQEMVHLVNKESSETPDQFMTADETRNLQNVDMKIGV

SEQ ID NO: 444 - protein, 458 aa, synthetic construct
  REGION 1..458: note = CD4__Homo_sapiens__P01730
MNRGVPFRHLLLVLQLALLPAATQGKKVVLGKKGDTVELTCTASQKKSIQFHWKNSNQIKILGNQGSFLTKGPSKLNDRADSRRSLWDQGNFPLIIKNLKIEDSDTYICEVEDQKEEVQLLVFGLTANSDTHLLQGQSLTLTLESPPGSSPSVQCRSPRGKNIQGGKTLSVSQLELQDSGTWTCTVLQNQKKVEFKIDIVVLAFQKASSIVYKKEGEQVEFSFPLAFTVEKLTGSGELWWQAERASSSKSWITFDLKNKEVSVKRVTQDPKLQMGKKLPLHLTLPQALPQYAGSGNLTLALEAKTGKLHQEVNLVVMRATQLQKNLTCEVWGPTSPKLMLSLKLENKEAKVSKREKAVWVLNPEAGMWQCLLSDSGQVLLESNIKVLPTWSTPVQPMALIVLGGVAGLLLFIGLGIFFCVRCRHRRRQAERMSQIKRLLSEKKTCQCPHRFQKTCSPI

SEQ ID NO: 445 - protein, 61 aa, synthetic construct
  REGION 1..61: note = CD52__Homo_sapiens__P31358
MKRFLFLLLTISLLVMVQIQTGLSGQNDTSQTSSPSASSNISGGIFLFFVANAIIHLFCFS

SEQ ID NO: 446 - protein, 61 aa, synthetic construct
  REGION 1..61: note = CD52__Homo_sapiens__Q6IBD0
MKRFLFLLLTISLLVMVQIQTGLSGQNDTSQTSSPSASSSMSGGIFLFFVANAIIHLFCFS

SEQ ID NO: 447 - protein, 61 aa, synthetic construct; identical to SEQ ID NO: 445
  REGION 1..61: note = CD52__Homo_sapiens__V9HWN9

SEQ ID NO: 448 - protein, 317 aa, synthetic construct
  REGION 1..317: note = CD55__Homo_sapiens__B1AP15
MTVARPSVPAALPLLGELPRLLLLVLLCLPAVWGDCGLPPDVPNAQPALEGRTSFPEDTVITYKCEESFVKIPGEKDSVICLKGSQWSDIEEFCNQKSCPNPGEIRNGQIDVPGGILFGATISFSCNTGYKLFGSTSSFCLISGSSVQWSDPLPECREIYCPAPPQIDNGIIQGERDHYGYRQSVTYACNKGFTMIGEHSIYCTVNNDEGEWSGPPPECRGKSLTSKVPPTVQKPTTVNVPTTEVSPTSQKTTTKTTTPNAQATRSTPVSRTTKHFHETTPNKGSGTTSGTTRLLSGHTCFTLTGLLGTLVTMGLLT

SEQ ID NO: 449 - protein, 293 aa, synthetic construct [sequence omitted]

SEQ ID NO: 450 - protein, 267 aa, synthetic construct [sequence omitted]

SEQ ID NO: 451 - protein, 381 aa, synthetic construct
  REGION 1..381: note = CD55__Homo_sapiens__P08174
MTVARPSVPAALPLLGELPRLLLLVLLCLPAVWGDCGLPPDVPNAQPALEGRTSFPEDTVITYKCEESFVKIPGEKDSVICLKGSQWSDIEEFCNRSCEVPTRLNSASLKQPYITQNYFPVGTVVEYECRPGYRREPSLSPKLTCLQNLKWSTAVEFCKKKSCPNPGEIRNGQIDVPGGILFGATISFSCNTGYKLFGSTSSFCLISGSSVQWSDPLPECREIYCPAPPQIDNGIIQGERDHYGYRQSVTYACNKGFTMIGEHSIYCTVNNDEGEWSGPPPECRGKSLTSKVPPTVQKPTTVNVPTTEVSPTSQKTTTKTTTPNAQATRSTPVSRTTKHFHETTPNKGSGTTSGTTRLLSGHTCFTLTGLLGTLVTMGLLT

SEQ ID NO: 452 - protein, 858 aa, synthetic construct
  REGION 1..858: note = CD56__Homo_sapiens__P13591
MLQTKDLIWTLFFLGTAVSLQVDIVPSQGEISVGESKFFLCQVAGDAKDKDISWFSPNGEKLTPNQQRISVVWNDDSSSTLTIYNANIDDAGIYKCVVTGEDGSESEATVNVKIFQKLMFKNAPTPQEFREGEDAVIVCDVVSSLPPTIIWKHKGRDVILKKDVRFIVLSNNYLQIRGIKKTDEGTYRCEGRILARGEINFKDIQVIVNVPPTIQARQNIVNATANLGQSVTLVCDAEGFPEPTMSWTKDGEQIEQEEDDEKYIFSDDSSQLTIKKVDKNDEAEYICIAENKAGEQDATIHLKVFAKPKITYVENQTAMELEEQVTLTCEASGDPIPSITWRTSTRNISSEEKASWTRPEKQETLDGHMVVRSHARVSSLTLKSIQYTDAGEYICTASNTIGQDSQSMYLEVQYAPKLQGPVAVYTWEGNQVNITCEVFAYPSATISWFRDGQLLPSSNYSNIKIYNTPSASYLEVTPDSENDFGNYNCTAVNRIGQESLEFILVQADTPSSPSIDQVEPYSSTAQVQFDEPEATGGVPILKYKAEWRAVGEEVWHSKWYDAKEASMEGIVTIVGLKPETTYAVRLAALNGKGLGEISAASEFKTQPVQGEPSAPKLEGQMGEDGNSIKVNLIKQDDGGSPIRHYLVRYRALSSEWKPEIRLPSGSDHVMLKSLDWNAEYEVYVVAENQQGKSKAAHFVFRTSAQPTAIPANGSPTSGLSTGAIVGILIVIFVLLLVVVDITCYFLNKCGLFMCIAVNLCGKAGPGAKGKDMEEGKAAFSKDESKEPIVEVRTEEERTPNHDGGKHTEPNETTPLTEPEKGPVEAKPECQETETKPAPAEVKTVPNDATQTKENESKA

SEQ ID NO: 453 - protein, 288 aa, synthetic construct
  REGION 1..288: note = CD80__Homo_sapiens__A0N0P2
MGHTRRQGTSPSKCPYLNFFQLLVLAGLSHFCSGVIHVTKEVKEVATLSCGHNVSVEELAQTRIYWQKEKKMVLTMMSGDMNIWPEYKNRTIFDITNNLSIVILALRPSDEGTYECVVLKYEKDAFKREHLAEVTLSVKADFPTPSISDFEIPTSNIRRIICSTSGGFPEPHLSWLENGEELNAINTTVSQDPETELYAVSSKLDFNMTTNHSFMCLIKYGHLRVNQTFNWNTTKQEHFPDNLLPSWAITLISVNGIFVICCLTYCFAPRCRERRRNERLRRESVRPV

SEQ ID NO: 454 - protein, 288 aa, synthetic construct; identical to SEQ ID NO: 453
  REGION 1..288: note = CD80__Homo_sapiens__P33681

SEQ ID NO: 455 - protein, 329 aa, synthetic construct
  REGION 1..329: note = CD86__Homo_sapiens__P42081
MDPQCTMGLSNILFVMAFLLSGAAPLKIQAYFNETADLPCQFANSQNQSLSELVVFWQDQENLVLNEVYLGKEKFDSVHSKYMGRTSFDSDSWTLRLHNLQIKDKGLYQCIIHHKKPTGMIRIHQMNSELSVLANFSQPEIVPISNITENVYINLTCSSIHGYPEPKKMSVLLRTKNSTIEYDGVMQKSQDNVTELYDVSISLSVSFPDVTSNMTIFCILETDKTRLLSSPFSIELEDPQPPPDHIPWITAVLPTVIICVMVFCLILWKWKKKKRPRNSYKCGTNTMEREESEQTKKREKIHIPERSDEAQRVFKSSKTSSCDKSDTCF

SEQ ID NO: 456 - protein, 235 aa, synthetic construct
  REGION 1..235: note = CD8A__Homo_sapiens__P01732
MALPVTALLLPLALLLHAARPSQFRVSPLDRTWNLGETVELKCQVLLSNPTSGCSWLFQPRGAAASPTFLLYLSQNKPKAAEGLDTQRFSGKRLGDTFVLTLSDFRRENEGYYFCSALSNSIMYFSHFVPVFLPAKPTTTPAPRPPTPAPTIASQPLSLRPEACRPAAGGAVHTRGLDFACDIYIWAPLAGTCGVLLLSLVITLYCNHRNRRRVCKCPRPVVKSGDKPSLSARYV

SEQ ID NO: 457 - protein, 823 aa, synthetic construct
  REGION 1..823: note = CDC27/m__Homo_sapiens__G5EA36
MTVLQEPVQAAIWQALNHYAYRDAVFLAERLYAEVHSEEALFLLATCYYRSGKAYKAYRLLKGHSCTTPQCKYLLAKCCVDLSKLAEGEQILSGGVFNKQKSHDDIVTEFGDSACFTLSLLGHVYCKTDRLAKGSECYQKSLSLNPFLWSPFESLCEIGEKPDPDQTFKFTSLQNFSNCLPNSCTTQVPNHSLSHRQPETVLTETPQDTIELNRLNLESSNSKYSLNTDSSVSYIDSAVISPDTVPLGTGTSILSKQVQNKPKTGRSLLGGPAALSPLTPSFGILPLETPSPGDGSYLQNYTNTPPVIDVPSTGAPSKKSVARIGQTGTKSVFSQSGNSREVTPILAQTQSSGPQTSTTPQVLSPTITSPPNALPRRSSRLFTSDSSTTKENSKKLKMKFPPKIPNRKTKSKTNKGGITQPNINDSLEITKLDSSIISEGKISTITPQIQAFNLQKAAAGLMSLLREMGKGYLALCSYNCKEAINILSHLPSHHYNTGWVLCQIGRAYFELSEYMQAERIFSEVRRIENYRVEGMEIYSTTLWHLQKDVALSVLSKDLTDMDKNSPEAWCAAGNCFSLQREHDIAIKFFQRAIQVDPNYAYAYTLLGHEFVLTEELDKALACFRNAIRVNPRHYNAWYGLGMIYYKQEKFSLAEMHFQKALDINPQSSVLLCHIGVVQHALKKSEKALDTLNKAIVIDPKNPLCKFHRASVLFANEKYKSALQELEELKQIVPKESLVYFLIGKVYKKLGQTHLALMNFSWAMDLDPKGANNQIKEAIDKRYLPDDEEPITQEEQIMGTDESQESSMTDADDTQLHAAESDEF

SEQ ID NO: 458 - protein, 824 aa, synthetic construct
  REGION 1..824: note = CDC27/m__Homo_sapiens__P30260
MTVLQEPVQAAIWQALNHYAYRDAVFLAERLYAEVHSEEALFLLATCYYRSGKAYKAYRLLKGHSCTTPQCKYLLAKCCVDLSKLAEGEQILSGGVFNKQKSHDDIVTEFGDSACFTLSLLGHVYCKTDRLAKGSECYQKSLSLNPFLWSPFESLCEIGEKPDPDQTFKFTSLQNFSNCLPNSCTTQVPNHSLSHRQPETVLTETPQDTIELNRLNLESSNSKYSLNTDSSVSYIDSAVISPDTVPLGTGTSILSKQVQNKPKTGRSLLGGPAALSPLTPSFGILPLETPSPGDGSYLQNYTNTPPVIDVPSTGAPSKKSVARIGQTGTKSVFSQSGNSREVTPILAQTQSSGPQTSTTPQVLSPTITSPPNALPRRSSRLFTSDSSTTKENSKKLKMKFPPKIPNRKTKSKTNKGGITQPNINDSLEITKLDSSIISEGKISTITPQIQAFNLQKAAAEGLMSLLREMGKGYLALCSYNCKEAINILSHLPSHHYNTGWVLCQIGRAYFELSEYMQAERIFSEVRRIENYRVEGMEIYSTTLWHLQKDVALSVLSKDLTDMDKNSPEAWCAAGNCFSLQREHDIAIKFFQRAIQVDPNYAYAYTLLGHEFVLTEELDKALACFRNAIRVNPRHYNAWYGLGMIYYKQEKFSLAEMHFQKALDINPQSSVLLCHIGVVQHALKKSEKALDTLNKAIVIDPKNPLCKFHRASVLFANEKYKSALQELEELKQIVPKESLVYFLIGKVYKKLGQTHLALMNFSWAMDLDPKGANNQIKEAIDKRYLPDDEEPITQEEQIMGTDESQESSMTDADDTQLHAAESDEF

SEQ ID NO: 459 - protein, 595 aa, synthetic construct
  REGION 1..595: note = CDE30__Homo_sapiens__P28908
MRVLLAALGLLFLGALRAFPQDRPFEDTCHGNPSHYYDKAVRRCCYRCPMGLFPTQQCPQRPTDCRKQCEPDYYLDEADRCTACVTCSRDDLVEKTPCAWNSSRVCECRPGMFCSTSAVNSCARCFFHSVCPAGMIVKFPGTAQKNTVCEPASPGVSPACASPENCKEPSSGTIPQAKPTPVSPATSSASTMPVRGGTRLAQEAASKLTRAPDSPSSVGRPSSDPGLSPTQPCPEGSGDCRKQCEPDYYLDEAGRCTACVSCSRDDLVEKTPCAWNSSRTCECRPGMICATSATNSCARCVPYPICAAETVTKPQDMAEKDTTFEAPPLGTQPDCNPTPENGEAPASTSPTQSLLVDSQASKTLPIPTSAPVALSSTGKPVLDAGPVLFWVILVLVVVVGSSAFLLCHRRACRKRIRQKLHLCYPVQTSQPKLELVDSRPRRSSTQLRSGASVTEPVAEERGLMSQPLMETCHSVGAAYLESLPLQDASPAGGPSSPRDLPEPRVSTEHTNNKIEKIYIMKADTVIVGTVKAELPEGRGLAGPAEPELEEELEADHTPHYPEQETEPPLGSCSDVMLSVEEEGKEDPLPTAASGK

SEQ ID NO: 460 - protein, 303 aa, synthetic construct
  REGION 1..303: note = CDK4/m__Homo_sapiens__A0A024RBB6
MATSRYEPVAEIGVGAYGTVYKARDPHSGHFVALKSVRVPNGGGGGGGLPISTVREVALLRRLEAFEHPNVVRLMDVCATSRTDREIKVTLVFEHVDQDLRTYLDKAPPPGLPAETIKDLMRQFLRGLDFLHANCIVHRDLKPENILVTSGGTVKLADFGLARIYSYQMALTPVVVTLWYRAPEVLLQSTYATPVDMWSVGCIFAEMFRRKPLFCGNSEADQLGKIFDLIGLPPEDDWPRDVSLPRGAFPPRGPRPVQSVVPEMEESGAQLLLEMLTFNPHKRISAFRALQHSYLHKDEGNPE

SEQ ID NO: 461 - protein, 303 aa, synthetic construct; identical to SEQ ID NO: 460
  REGION 1..303: note = CDK4/m__Homo_sapiens__P11802

SEQ ID NO: 462 - protein, 229 aa, synthetic construct
  REGION 1..229: note = CDK4/m__Homo_sapiens__Q6LC83
MDVCATSRTDREIKVTLVFEHVDQDLRTYLDKAPPPGLPAETIKDLMRQFLRGLDFLHANCIVHRDLKPENILVTSGGTVKLADFGLARIYSYQMALTPVVVTLWYRAPEVLLQSTYATPVDMWSVGCIFAEMFRRKPLFCGNSEADQLGKIFDLIGLPPEDDWPRDVSLPRGAFPPRGPRPVQSVVPEMEESGAQLLLEMLTFNPHKRISAFRALQHSYLHKDEGNPE

SEQ ID NO: 463 - protein, 111 aa, synthetic construct
  REGION 1..111: note = CDK4/m__Homo_sapiens__Q96BE9
MATSRYEPVAEIGVGAYGTVYKARDPHSGHFVALKSVRVPNGGGGGGGLPISTVREVALLRRLEAFEHPNVVRLMDVCATSRTDREIKRCFVESLSSVETLKPTSWAKSLT

SEQ ID NO: 464 - protein, 142 aa, synthetic construct [sequence omitted]

SEQ ID NO: 465 - protein, 116 aa, synthetic construct
  REGION 1..116: note = CDKN2A/m__Homo_sapiens__G3XAG3
MEPAAGSSMEPSADWLATAAARGRVEEVRALLEAGALPNAPNSYGRRPIQVGRGSAAGAGDGGRLWRTKFAGELESGSASILRKKGRLPGEFSEGVCNHRPPPGDALGAWEAKEEE

SEQ ID NO: 466 - protein, 156 aa, synthetic construct
  REGION 1..156: note = CDKN2A/m__Homo_sapiens__K7PML8
MEPAAGSSMEPSADWLATAAARGRVEEVRALLEAGALPNAPNSYGRRPIQVMMMGSARVAELLLLHGAEPNCADPATLTRPVHDAAREGFLDTLVVLHRAGARLDVRDAWGRLPVDLAEELGHRDVARYLRAAAGGTRGSNHARIDAAEGPSDIPD

SEQ ID NO: 467 - protein, 108 aa, synthetic construct
  REGION 1..108: note = CDKN2A/m__Homo_sapiens__L8E941
MEVMMMGSARVAELLLLHGAEPNCADPATLTRPVHDAAREGFLDTLVVLHRAGARLDVRDAWGRLPVDLAEELGHRDVARYLRAAAGGTRGSNHARIDAAEGPSDIPD

SEQ ID NO: 468 - protein, 132 aa, synthetic construct
  REGION 1..132: note = CDKN2A/m__Homo_sapiens__Q8N726
MVRRFLVTLRIRRACGPPRVRVFVVHIPRLTGEWAAPGAPAAVALVLMLLRSQRLGQQPLPRRPGHDDGQRPSGGAAAAPRRGAQLRRPRHSHPTRARRCPGGLPGHAGGAAPGRGAAGRARCLGPSARGPG

SEQ ID NO: 469 - protein, 702 aa, synthetic construct
  REGION 1..702: note = CEA__Homo_sapiens__NP_004354
MESPSAPPHRWCIPWQRLLLTASLLTFWNPPTTAKLTIESTPFNVAEGKEVLLLVHNLPQHLFGYSWYKGERVDGNRQIIGYVIGTQQATPGPAYSGREIIYPNASLLIQNIIQNDTGFYTLHVIKSDLVNEEATGQFRVYPELPKPSISSNNSKPVEDKDAVAFTCEPETQDATYLWWVNNQSLPVSPRLQLSNGNRTLTLFNVTRNDTASYKCETQNPVSARRSDSVILNVLYGPDAPTISPLNTSYRSGENLNLSCHAASNPPAQYSWFVNGTFQQSTQELFIPNITVNNSGSYTCQAHNSDTGLNRTTVTTITVYAEPPKPFITSNNSNPVEDEDAVALTCEPEIQNTTYLWWVNNQSLPVSPRLQLSNDNRTLTLLSVTRNDVGPYECGIQNELSVDHSDPVILNVLYGPDDPTISPSYTYYRPGVNLSLSCHAASNPPAQYSWLIDGNIQQHTQELFISNITEKNSGLYTCQANNSASGHSRTTVKTITVSAELPKPSISSNNSKPVEDKDAVAFTCEPEAQNTTYLWWVNGQSLPVSPRLQLSNGNRTLTLFNVTRNDARAYVCGIQNSVSANRSDPVTLDVLYGPDTPIISPPDSSYLSGANLNLSCHSASNPSPQYSWRINGIPQQHTQVLFIAKITPNNNGTYACFVSNLATGRNNSIVKSITVSASGTSPGLSAGATVGIMIGVLVGVALI

SEQ ID NO: 470 - protein, 344 aa, synthetic construct
  REGION 1..344: note = CEAM6__Homo_sapiens__P40199
MGPPSAPPCRLHVPWKEVLLTASLLTFWNPPTTAKLTIESTPFNVAEGKEVLLLAHNLPQNRIGYSWYKGERVDGNSLIVGYVIGTQQATPGPAYSGRETIYPNASLLIQNVTQNDTGFYTLQVIKSDLVNEEATGQFHVYPELPKPSISSNNSNPVEDKDAVAFTCEPEVQNTTYLWWVNGQSLPVSPRLQLSNGNMTLTLLSVKRNDAGSYECEIQNPASANRSDPVTLNVLYGPDGPTISPSKANYRPGENLNLSCHAASNPPAQYSWFINGTFQQSTQELFIPNITVNNSGSYMCQAHNSATGLNRTTVTMITVSGSAPVLSAVATVGITIGVLARVALI

SEQ ID NO: 471 - protein, 390 aa, synthetic construct
  REGION 1..390: note = CH3L2__Homo_sapiens__Q15782
MGATTMDQKSLWAGVVVLLLLQGGSAYKLVCYFTNWSQDRQEPGKFTPENIDPFLCSHLIYSFASIENNKVIIKDKSEVMLYQTINSLKTKNPKLKILLSIGGYLFGSKGFHPMVDSSTSRLEFINSIILFLRNHNFDGLDVSWIYPDQKENTHFTVLIHELAEAFQKDFTKSTKERLLLTAGVSAGRQMIDNSYQVEKLAKDLDFINLLSFDFHGSWEKPLITGHNSPLSKGWQDRGPSSYYNVEYAVGYWIHKGMPSEKVVMGIPTYGHSFTLASAETTVGAPASGPGAAGPITESSGFLAYYEICQFLKGAKITRLQDQQVPYAVKGNQWVGYDDVKSMETKVQFLKNLNLGGAMIWSIDMDDFTGKSCNQGPYPLVQAVKRSLGSL

SEQ ID NO: 472 - protein, 943 aa, synthetic construct
  REGION 1..943: note = CLCA2__Homo_sapiens__Q9UQC9
MTQRSIAGPICNLKFVTLLVALSSELPFLGAGVQLQDNGYNGLLIAINPQVPENQNLISNIKEMITEASFYLFNATKRRVFFRNIKILIPATWKANNNSKIKQESYEKANVIVTDWYGAHGDDPYTLQYRGCGKEGKYIHFTPNFLLNDNLTAGYGSRGRVFVHEWAHLRWGVFDEYNNDKPFYINGQNQIKVTRCSSDITGIFVCEKGPCPQENCIISKLFKEGCTFIYNSTQNATASIMFMQSLSSVVEFCNASTHNQEAPNLQNQMCSLRSAWDVITDSADFHHSFPMNGTELPPPPTFSLVQAGDKVVCLVLDVSSKMAEADRLLQLQQAAEFYLMQIVEIHTFVGIASFDSKGEIRAQLHQINSNDDRKLLVSYLPTTVSAKTDISICSGLKKGFEVVEKLNGKAYGSVMILVTSGDDKLLGNCLPTVLSSGSTIHSIALGSSAAPNLEELSRLTGGLKFFVPDISNSNSMIDAFSRISSGTGDIFQQHIQLESTGENVKPHHQLKNTVTVDNTVGNDTMFLVTWQASGPPEIILFDPDGRKYYTNNFITNLTFRTASLWIPGTAKPGHWTYTLNNTHHSLQALKVTVTSRASNSAVPPATVEAFVERDSLHFPHPVMIYANVKQGFYPILNATVTATVEPETGDPVTLRLLDDGAGADVIKNDGIYSRYFFSFAANGRYSLKVHVNHSPSISTPAHSIPGSHAMYVPGYTANGNIQMNAPRKSVGRNEEERKWGFSRVSSGGSFSVLGVPAGPHPDVFPPCKIIDLEAVKVEEELTLSWTAPGEDFDQGQATSYEIRMSKSLQNIQDDFNNAILVNTSKRNPQQAGIREIFTFSPQISTNGPEHQPNGETHESHRIYVAIRAMDRNSLQSAVSNIAQAPLFIPPNSDPVPARDYLILKGVLTAMGLIGIICLIIVVTHHTLSRKKRADKKENGTKLL

SEQ ID NO: 473 - protein, 235 aa, synthetic construct
  REGION 1..235: note = CML28__Homo_sapiens__Q9NQT4
MEEETHTDAKIRAENGTGSSPRGPGCSLRHFACEQNLLSRPDGSASFLQGDTSVLAGVYGPAEVKVSKEIFNKATLEVILRPKIGLPGVAEKSRERLIRNTCEAVVLGTLHPRTSITVVLQVVSDAGSLLACCLNAACMALVDAGVPMRALFCGVACALDSDGTLVLDPTSKQEKEARAVLTFALDSVERKLLMSSTKGLYSDTELQQCLAAAQAASQHVFRFYRESLQRRYSKS

SEQ ID NO: 474 - protein, 583 aa, synthetic construct
  REGION 1..583: note = CML66__Homo_sapiens__Q96RS6
MEVAANCSLRVKRPLLDPRFEGYKLSLEPLPCYQLELDAAVAEVKLRDDQYTLEHMHAFGMYNYLHCDSWYQDSVYYIDTLGRIMNLTVMLDTALGKPREVFRLPTDLTACDNRLCASIHFSSSTWVTLSDGTGRLYVIGTGERGNSASEKWEIMFNEELGDPFIIIHSISLLNAEEHSIATLLLRIEKEELDMKGSGFYVSLEWVTISKKNQDNKKYEIIKRDILRGKSVPHYAAIEPDGNGLMIVSYKSLTFVQAGQDLEENMDEDISEKIKEPLYYWQQTEDDLTVTIRLPEDSTKEDIQIQFLPDHINIVLKDHQFLEGKLYSSIDHESSTWIIKESNSLEISLIKKNEGLTWPELVIGDKQGELIRDSAQCAAIAERLMHLTSEELNPNPDKEKPPCNAQELEECDIFFEESSSLCRFDGNTLKTTHVVNLGSNQYLFSVIVDPKEMPCFCLRHDVDALLWQPHSSKQDDMWEHIATFNALGYVQASKRDKKFFACAPNYSYAALCECLRRVFIYRQPAPMSTVLYNRKEGRQVGQVAKQQVASLETNDPILGFQATNERLFVLTTKNLFLIKVNTEN

SEQ ID NO: 475 - protein, 520 aa, synthetic construct
  REGION 1..520: note = COA-1/m__Homo_sapiens__Q5T124
MSSPLASLSKTRKVPLPSEPMNPGRRGIRIYGDEDEVDMLSDGCGSEEKISVPSCYGGIGAPVSRQVPASHDSELMAFMTRKLWDLEQQVKAQTDEILSKDQKIAALEDLVQTLRPHPAEATLQRQEELETMCVQLQRQVREMERFLSDYGLQWVGEPMDQEDSESKTVSEHGERDWMTAKKFWKPGDSLAPPEVDFDRLLASLQDLSELVVEGDTQVTPVPGGARLRTLEPIPLKLYRNGIMMFDGPFQPFYDPSTQRCLRDILDGFFPSELQRLYPNGVPFKVSDLRNQVYLEDGLDPFPGEGRVVGRQLMHKALDRVEEHPGSRMTAEKFLNRLPKFVIRQGEVIDIRGPIRDTLQNCCPLPARIQEIVVETPTLAAERERSQESPNTPAPPLSMLRIKSENGEQAFLLMMQPDNTIGDVRALLAQARVMDASAFEIFSTFPPTLYQDDTLTLQAAGLVPKAALLLRARRAPKSSLKFSPGPCPGPGPGPSPGPGPGPSPGPGPGPSPCPGPSPSPQ

SEQ ID NO: 476 - protein, 142 aa, synthetic construct
  REGION 1..142: note = coactosin-like_protein__Homo_sapiens__Q14019
MATKIDKEACRAAYNLVRDDGSAVIWVTFKYDGSTIVPGEQGAEYQHFIQQCTDDVRLFAFVRFTTGDAMSKRSKFALITWIGENVSGLQRAKTGTDKTLVKEVVQNFAKEFVISDRKELEEDFIKSELKKAGGANYDAQTE

SEQ ID NO: 477 - protein, 164 aa, synthetic construct
  REGION 1..164: note = collagen_XXIII__Homo_sapiens__L8EAS4
MATRDPWVWMASPDFQARKGKRVHQETLAPGETKDKMELLGLRGPLDLLGPGALLATLGKMAPGEHKAQRAPKESPDKTARWAQRDPQGPRVSLEYLERRATMGHQASLDHQGPRASQGAWGLGERTVWTVPQDRRGSLATEARMELQGPGVPQASRASRETQW

SEQ ID NO: 478 - protein, 540 aa, synthetic construct
  REGION 1..540: note = collagen_XXIII__Homo_sapiens__Q86Y22
MGPGERAGGGGDAGKGNAAGGGGGGRSATTAGSRAVSALCLLLSVGSAAACLLLGVQAAALQGRVAALEEERELLRRAGPPGALDAWAEPHLERLLREKLDGLAKIRTAREAPSECVCPPGPPGRRGKPGRRGDPGPPGQSGRDGYPGPLGLDGKPGLPGPKGEKGAPGDFGPRGDQGQDGAAGPPGPPGPPGARGPPGDTGKDGPRGAQGPAGPKGEPGQDGEMGPKGPPGPKGEPGVPGKKGDDGTPSQPGPPGPKGEPGSMGPRGENGVDGAPGPKGEPGHRGTDGAAGPRGAPGLKGEQGDTVVIDYDGRILDALKGPPGPQGPPGPPGIPGAKGELGLPGAPGIDGEKGPKGQKGDPGEPGPAGLKGEAGEMGLSGLPGADGLKGEKGESASDSLQESLAQLIVEPGPPGPPGPPGPMGLQGIQGPKGLDGAKGEKGASGERGPSGLPGPVGPPGLIGLPGTKGEKGRPGEPGLDGFPGPRGEKGDRSERGEKGERGVPGRKGVKGQKGEPGPPGLDQPCPVGPDGLPVPGCWHK

SEQ ID NO: 479 - protein, 163 aa, synthetic construct
  REGION 1..163: note = COX-2__Homo_sapiens__Q6ZYK7
MLARALLLCAVLALSHTANPCCSHPCQNRGVCMSVGFDQYKCDCTRTGFYGENCSTPEFLTRIKLFLKPTPNTVHYILTHFKGFWNVVNNIPFLRNAIMSYVLTSRSHLIDSPPTYNADYGYKSWEAFSNLSYYTRALPPVPDDCPTPLGVKALHASVFQDRS

SEQ ID NO: 480 - protein, 543 aa, synthetic construct
  REGION 1..543: note = CP1B1__Homo_sapiens__Q16678
MGTSLSPNDPWPLNPLSIQQTTLLLLLSVLATVHVGQRLLRQRRRQLRSAPPGPFAWPLIGNAAAVGQAAHLSFARLARRYGDVFQIRLGSCPIVVLNGERAIHQALVQQGSAFADRPAFASFRVVSGGRSMAFGHYSEHWKVQRRAAHSMMRNFFTRQPRSRQVLEGHVLSEARELVALLVRGSADGAFLDPRPLTVVAVANVMSAVCFGCRYSHDDPEFRELLSHNEEFGRTVGAGSLVDVMPWLQYFPNPVRTVFREFEQLNRNFSNFILDKFLRHCESLRPGAAPRDMMDAFILSAEKKAAGDSHGGGARLDLENVPATITDIFGASQDTLSTALQWLLLLFTRYPDVQTRVQAELDQVVGRDRLPCMGDQPNLPYVLAFLYEAMRFSSFVPVTIPHATTANTSVLGYHIPKDTVVFVNQWSVNHDPLKWPNPENFDPARFLDKDGLINKDLTSRVMIFSVGKRRCIGEELSKMQLFLFISILAHQCDFRANPNEPAKMNFSYGLTIKPKSFKVNVTLRESMELLDSAVQNLQAKETCQ

SEQ ID NO: 481 - protein, 110 aa, synthetic construct
  REGION 1..110: note = CSAG2__Homo_sapiens__Q9Y5P2-2
MWMGLIQLVEGVKRKDQGFLEKEFYHKTNIKMRCEFLACWPAFTVLGEAWRDQVDWSRLLRDAGLVKMSRKPRASSPLSNNHPPTPKRFPRQPGREKGPIKEVPGTKGSP

SEQ ID NO: 482 - protein, 127 aa, synthetic construct
  REGION 1..127: note = CSAG2__Homo_sapiens__Q9Y5P2
MWMGLIQLVEGVKRKDQGFLEKEFYHKTNIKMRCEFLACWPAFTVLGEAWRDQVDWSRLLRDAGLVKMSRKPRASSPLSNNHPPTPKRRGSGRHPLNPGPEALSKFPRQPGREKGPIKEVPGTKGSP

SEQ ID NO: 483 - protein, 189 aa, synthetic construct
  REGION 1..189: note = CT45A1__Homo_sapiens__Q5HYN5
MTDKTEKVAVDPETVFKRPRECDSPSYQKRQRMALLARKQGAGDSLIAGSAMSKAKKLMTGHAIPPSQLDSQIDDFTGFSKDRMMQKPGSNAPVGGNVTSSFSGDDLECRETASSPKSQREINADIKRKLVKELRCVGQKYEKIFEMLEGVQGPTAVRKRFFESIIKEAARCMRRDFVKHLKKKLKRMI

SEQ ID NO: 484 - protein, 264 aa, synthetic construct
  REGION 1..264: note = CT55__Homo_sapiens__Q8WUE5
MLRLLRLALAFYGRTADPAERQGPQQQGLPQGDTQLTTVQGVVTSFCGDYGMIDESIYFSSDVVTGNVPLKVGQKVNVVVEEDKPHYGLRAIKVDVVPRHLYGAGPSDSGTRVLIGCVTSINEDNIYISNSIYFSIAIVSEDFVPYKGDLLEVEYSTEPGISNIKATSVKPIRCIHTEEVCITSVHGRNGVIDYTIFFTLDSVKLPDGYVPQVDDIVNVVMVESIQFCFIWRAISITPVHKSSSGFQDDGGLGRPKRERRSQSI

SEQ ID NO: 485 - protein, 947 aa, synthetic construct
  REGION 1..947: note = CT-_9/BRD6__Homo_sapiens__Q58F21
MSLPSRQTAIIVNPPPPEYINTKKNGRLTNQLQYLQKVVLKDLWKHSFSWPFQRPVDAVKLQLPDYYTIIKNPMDLNTIKKRLENKYYAKASECIEDFNTMFSNCYLYNKPGDDIVLMAQALEKLFMQKLSQMPQEEQVVGVKERIKKGTQQNIAVSSAKEKSSPSATEKVFKQQEIPSVFPKTSISPLNVVQGASVNSSSQTAAQVTKGVKRKADTTTPATSAVKASSEFSPTFTEKSVALPPIKENMPKNVLPDSQQQYNVVKTVKVTEQLRHCSEILKEMLAKKHFSYAWPFYNPVDVNALGLHNYYDVVKNPMDLGTIKEKMDNQEYKDAYKFAADVRLMFMNCYKYNPPDHEVVTMARMLQDVFETHFSKIPIEPVESMPLCYIKTDITETTGRENTNEASSEGNSSDDSEDERVKRLAKLQEQLKAVHQQLQVLSQVPFRKLNKKKEKSKKEKKKEKVNNSNENPRKMCEQMRLKEKSKRNQPKKRKQQFIGLKSEDEDNAKPMNYDEKRQLSLNINKLPGDKLGRVVHIIQSREPSLSNSNPDEIEIDFETLKASTLRELEKYVSACLRKRPLKPPAKKIMMSKEELHSQKKQELEKRLLDVNNQLNSRKRQTKSDKTQPSKAVENVSRLSESSSSSSSSSESESSSSDLSSSDSSDSESEMFPKFTEVKPNDSPSKENVKKMKNECIPPEGRTGVTQIGYCVQDTTSANTTLVHQTTPSHVMPPNHHQLAFNYQELEHLQTVKNISPLQILPPSGDSEQLSNGITVMHPSGDSDTTMLESECQAPVQKDIKIKNADSWKSLGKPVKPSGVMKSSDELFNQFRKAAIEKEVKARTQELIRKHLEQNTKELKASQENQRDLGNGLTVESFSNKIQNKCSGEEQKEHQQSSEAQDKSKLWLLKDRDLARQKEQERRRREAMVGTIDMTLQSDIMTMFENNFD

SEQ ID NO: 486 - protein, 180 aa, synthetic construct
  REGION 1..180: note = CTAG2_Isoform_LAGE-1A__Homo_sapiens__O75638-2
MQAEGRGTGGSTGDADGPGGPGIPDGPGGNAGGPGEAGATGGRGPRGAGAARASGPRGGAPRGPHGGAASAQDGRCPCGARRPDSRLLELHITMPFSSPMEAELVRRILSRDAAPLPRPGAVLKDFTVSGNLLFIRLTAADHRQLQLSISSCLQQLSLLMWITQCFLPVFLAQAPSGQRR

SEQ ID NO: 487 - protein, 210 aa, synthetic construct; identical to SEQ ID NO: 368
  REGION 1..210: note = CTAG2_Isoform_LAGE-1B__Homo_sapiens__O75638

SEQ ID NO: 488 - protein, 663 aa, synthetic construct
  REGION 1..663: note = CTCFL__Homo_sapiens__Q8NI51
MAATEISVLSEQFTKIKELELMPEKGLKEEEKDGVCREKDHRSPSELEAERTSGAFQDSVLEEEVELVLAPSEESEKYILTLQTVHFTSEAVELQDMSLLSIQQQEGVQVVVQQPGPGLLWLEEGPRQSLQQCVAISIQQELYSPQEMEVLQFHALEENVMVASEDSKLAVSLAETTGLIKLEEEQEKNQLLAERTKEQLFFVETMSGDERSDEIVLTVSNSNVEEQEDQPTAGQADAEKAKSTKNQRKTKGAKGTFHCDVCMFTSSRMSSFNRHMKTHTSEKPHLCHLCLKTFRTVTLLRNHVNTHTGTRPYKCNDCNMAFVTSGELVRHRRYKHTHEKPFKCSMCKYASVEASKLKRHVRSHTGERPFQCCQCSYASRDTYKLKRHMRTHSGEKPYECHICHTRFTQSGTMKIHILQKHGENVPKYQCPHCATIIARKSDLRVHMRNLHAYSAAELKCRYCSAVFHERYALIQHQKTHKNEKRFKCKHCSYACKQERHMTAHIRTHTGEKPFTCLSCNKCFRQKQLLNAHFRKYHDANFIPTVYKCSKCGKGFSRWINLHRHSEKCGSGEAKSAASGKGRRTRKRKQTILKEATKGQKEAAKGWKEAANGDEAAAEEASTTKGEQFPGEMFPVACRETTARVKEEVDEGVTCEMLLNTMDK

SEQ ID NO: 489 - protein, 715 aa, synthetic construct
  REGION 1..715: note = Cten__Homo_sapiens__Q8IZW8
MSQVMSSPLLAGGHAVSLAPCDEPRRTLHPAPSPSLPPQCSYYTTEGWGAQALMAPVPCMGPPGRLQQAPQVEAKATCFLPSPGEKALGTPEDLDSYIDFSLESLNQMILELDPTFQLLPPGTGGSQAELAQSTMSMRKKEESEALDIKYIEVTSARSRCHDGPQHCSSPSVTPPFGSLRSGGLLLSRDVPRETRSSSESLIFSGNQGRGHQRPLPPSEGLSPRPPNSPSISIPCMGSKASSPHGLGSPLVASPRLEKRLGGLAPQRGSRISVLSASPVSDVSYMFGSSQSLLHSSNSSHQSSSRSLESPANSSSSLHSLGSVSLCTRPSDFQAPRNPTLTMGQPRTPHSPPLAKEHASSCPPSITNSMVDIPIVLINGCPEPGSSPPQRTPGHQNSVQPGAASPSNPCPATRSNSQTLSDAPFTTCPEGPARDMQPTMKFVMDTSKYWFKPNITREQAIELLRKEEPGAFVIRDSSSYRGSFGLALKVQEVPASAQSRPGEDSNDLIRHFLIESSAKGVHLKGADEEPYFGSLSAFVCQHSIMALALPCKLTIPQRELGGADGASDSTDSPASCQKKSAGCHTLYLSSVSVETLTGALAVQKAISTTFERDILPTPTVVHFKVTEQGITLTDVQRKVFFRRHYPLTTLRFCGMDPEQRKWQKYCKPSWIFGFVAKSQTEPQENVCHLFAEYDMVQPASQVIGLVTALLQDAERM

SEQ ID NO: 490 - protein, 433 aa, synthetic construct
  REGION 1..433: note = cyclin_B1__Homo_sapiens__P14635
MALRVTRNSKINAENKAKINMAGAKRVPTAPAATSKPGLRPRTALGDIGNKVSEQLQAKMPMKKEAKPSATGKVIDKKLPKPLEKVPMLVPVPVSEPVPEPEPEPEPEPVKEEKLSPEPILVDTASPSPMETSGCAPAEEDLCQAFSDVILAVNDVDAEDGADPNLCSEYVKDIYAYLRQLEEEQAVRPKYLLGREVTGNMRAILIDWLVQVQMKFRLLQETMYMTVSIIDRFMQNNCVPKKMLQLVGVTAMFIASKYEEMYPPEIGDFAFVTDNTYTKHQIRQMEMKILRALNFGLGRPLPLHFLRRASKIGEVDVEQHTLAKYLMELTMLDYDMVHFPPSQIAAGAFCLALKILDNGEWTPTLQHYLSYTEESLLPVMQHLAKNVVMVNQGLTKHMTVKNKYATSKHAKISTLPQLNSALVQDLAKAVAKV

SEQ ID NO: 491 - protein, 295 aa, synthetic construct
  REGION 1..295: note = cyclin_D1__Homo_sapiens__P24385
MEHQLLCCEVETIRRAYPDANLLNDRVLRAMLKAEETCAPSVSYFKCVQKEVLPSMRKIVATWMLEVCEEQKCEEEVFPLAMNYLDRFLSLEPVKKSRLQLLGATCMFVASKMKETIPLTAEKLCIYTDNSIRPEELLQMELLLVNKLKWNLAAMTPHDFIEHFLSKMPEAEENKQIIRKHAQTFVALCATDVKFISNPPSMVAAGSVVAAVQGLNLRSPNNFLSYYRLTRFLSRVIKCDPDCLRACQEQIEALLESSLRQAQQNMDPKAAEEEEEEEEEVDLACTPTDVRDVDI

SEQ ID NO: 492 - protein, 216 aa, synthetic construct
  REGION 1..216: note = cyp-B__Homo_sapiens__P23284
MLRLSERNMKVLLAAALIAGSVFFLLLPGPSAADEKKKGPKVTVKVYFDLRIGDEDVGRVIFGLFGKTVPKTVDNFVALATGEKGFGYKNSKFHRVIKDFMIQGGDFTRGDGTGGKSIYGERFPDENFKLKHYGPGWVSMANAGKDTNGSQFFITTVKTAWLDGKHVVFGKVLEGMEVVRKVESTKTDSRDKPLKDVIIADCGKIEVEKPFAIAKE

SEQ ID NO: 493 - protein, 347 aa, synthetic construct
  REGION 1..347: note = DAM-10__Homo_sapiens__P43366
MPRGQKSKLRAREKRRKAREETQGLKVAHATAAEKEECPSSSPVLGDTPTSSPAAGIPQKPQGAPPTTTAAAAVSCTESDEGAKCQGEENASFSQATTSTESSVKDPVAWEAGMLMHFILRKYKMREPIMKADMLKVVDEKYKDHFTEILNGASRRLELVFGLDLKEDNPSGHTYTLVSKLNLTNDGNLSNDWDFPRNGLLMPLLGVIFLKGNSATEEEIWKFMNVLGAYDGEEHLIYGEPRKFITQDLVQEKYLKYEQVPNSDPPRYQFLWGPRAYAETTKMKVLEFLAKMNGATPRDFPSHYEEALRDEEERAQVRSSVRARRRTTATTFRARSRAPFSRSSHPM

SEQ ID NO: 494 - protein, 811 aa, synthetic construct
  REGION 1..811: note = DEP1A__Homo_sapiens__Q5TB30
MESQGVPPGPYRATKLWNEVTTSFRAGMPLRKHRQHFKKYGNCFTAGEAVDWLYDLLRNNSNFGPEVTRQQTIQLLRKFLKNHVIEDIKGRWGSENVDDNNQLFRFPATSPLKTLPRRYPELRKNNIENFSKDKDSIFKLRNLSRRTPKRHGLHLSQENGEKIKHEIINEDQENAIDNRELSQEDVEEVWRYVILIYLQTILGVPSLEEVINPKQVIPQYIMYNMANTSKRGVVILQNKSDDLPHWVLSAMKCLANWPRSNDMNNPTYVGFERDVFRTIADYFLDLPEPLLTFEYYELFVNILVVCGYITVSDRSSGIHKIQDDPQSSKFLHLNNLNSFKSTECLLLSLLHREKNKEESDSTERLQISNPGFQERCAKKMQLVNLRNRRVSANDIMGGSCHNLIGLSNMHDLSSNSKPRCCSLEGIVDVPGNSSKEASSVFHQSFPNIEGQNNKLFLESKPKQEFLLNLHSEENIQKPFSAGFKRTSTLTVQDQEELCNGKCKSKQLCRSQSLLLRSSTRRNSYINTPVAEIIMKPNVGQGSTSVQTAMESELGESSATINKRLCKSTIELSENSLLPASSMLTGTQSLLQPHLERVAIDALQLCCLLLPPPNRRKLQLLMRMISRMSQNVDMPKLHDAMGTRSLMIHTFSRCVLCCAEEVDLDELLAGRLVSFLMDHHQEILQVPSYLQTAVEKHLDYLKKGHIENPGDGLFAPLPTYSYCKQISAQEFDEQKVSTSQAAIAELLENIIKNRSLPLKEKRKKLKQFQKEYPLIYQKRFPTTESEAALFGDKPTIKQPMLILRKPKFRSLR

SEQ ID NO: 495 - protein, 98 aa, synthetic construct
  REGION 1..98: note = E7__Human_papillomavirus_type_16__P03129
MHGDTPTLHEYMLDLQPETTDLYCYEQLNDSSEEEDEIDGPAGQAEPDRAHYNIVTFCCKCDSTLRLCVQSTHVDIRTLEDLLMGTLGIVCPICSQKP

SEQ ID NO: 496 - protein, 105 aa, synthetic construct
  REGION 1..105: note = E7__Human_papillomavirus_type_18__P06788
MHGPKATLQDIVLHLEPQNEIPVDLLCHEQLSDSEEENDEIDGVNHQHLPARRAEPQRHTMLCMCCKCEARIKLVVESSADDLRAFQQLFLNTLSFVCPWCASQQ

SEQ ID NO: 497 - protein, 98 aa, synthetic construct
  REGION 1..98: note = E7__Human_papillomavirus_type_31__P17387
MRGETPTLQDYVLDLQPEATDLHCYEQLPDSSDEEDVIDSPAGQAEPDTSNYNIVTFCCQCKSTLRLCVQSTQVDIRILQELLMGSFGIVCPNCSTRL

SEQ ID NO: 498 - protein, 97 aa, synthetic construct
  REGION 1..97: note = E7__Human_papillomavirus_type_33__P06429
MRGHKPTLKEYVLDLYPEPTDLYCYEQLSDSSDEDEGLDRPDGQAQPATADYYIVTCCHTCNTTVRLCVNSTASDLRTIQQLLMGTVNIVCPTCAQQ

SEQ ID NO: 499 - protein, 99 aa, synthetic construct
  REGION 1..99: note = E7__Human_papillomavirus_type_35__P27230
MHGEITTLQDYVLDLEPEATDLYCYEQLCDSSEEEEDTIDGPAGQAKPDTSNYNIVTSCCKCEATLRLCVQSTHIDIRKLEDLLMGTFGIVCPGCSQRA

SEQ ID NO: 500 - protein, 109 aa, synthetic construct
  REGION 1..109: note = E7__Human_papillomavirus_type_39__P24837
MRGPKPTLQEIVLDLCPYNEIQPVDLVCHEQLGESEDEIDEPDHAVNHQHQLLARRDEPQRHTIQCSCCKCNNTLQLVVEASRDTLRQLQQLFMDSLGFVCPWCATANQ

SEQ ID NO: 501 - protein, 106 aa, synthetic construct
  REGION 1..106: note = E7__Human_papillomavirus_type_45__P21736
MHGPRETLQEIVLHLEPQNELDPVDLLCYEQLSESEEENDEADGVSHAQLPARRAEPQRHKILCVCCKCDGRIELTVESSAEDLRTLQQLFLSTLSFVCPWCATNQ

SEQ ID NO: 502 - protein, 101 aa, synthetic construct
  REGION 1..101: note = E7__Human_papillomavirus_type_51__P26558
MRGNVPQLKDVVLHLTPQTEIDLQCYEQFDSSEEEDEVDNMRDQLPERRAGQATCYRIEAPCCRCSSVVQLAVESSGDTLRVVQQMLMGELSLVCPCCANN

SEQ ID NO: 503 - protein, 99 aa, synthetic construct
  REGION 1..99: note = E7__Human_papillomavirus_type_52__P36831
MRGDKATIKDYILDLQPETTDLHCYEQLGDSSDEEDTDGVDRPDGQAEQATSNYYIVTYCHSCDSTLRLCIHSTATDLRTLQQMLLGTLQVVCPGCARL

SEQ ID NO: 504 - protein, 105 aa, synthetic construct
  REGION 1..105: note = E7__Human_papillomavirus_type_56__P36833
MHGKVPTLQDVVLELTPQTEIDLQCNEQLDSSEDEDEDEVDHLQERPQQARQAKQHTCYLIHVPCCECKFVVQLDIQSTKEDLRVVQQLLMGALTVTCPLCASSN

SEQ ID NO: 505 - protein, 98 aa, synthetic construct
  REGION 1..98: note = E7__Human_papillomavirus_type_58__Q9QCZ1
MRGNNPTLREYILDLHPEPTDLFCYEQLCDSSDEDEIGLDRPDGQAQPATANYYIVTCCYTCDTTVRLCINSTTTDVRTLQQLLMGTCTIVCPSCAQQ

SEQ ID NO: 506 - protein, 107 aa, synthetic construct
  REGION 1..107: note = E7__Human_papillomavirus_type_59__Q81965
MHGPKATLCDIVLDLEPQNYEEVDLVCYEQLPDSDSENEKDEPDGVNHPLLLARRAEPQRHNIVCVCCKCNNQLQLVVETSQDGLRALQQLFMDTLSFVCPLCAANQ

SEQ ID NO: 507 - protein, 105 aa, synthetic construct
  REGION 1..105: note = E7__Human_papillomavirus_type_66__Q80956
MHGKVPTLQEVILELAPQTEIDLQCNEQLDSSEDEDEDEIDHLLERPQQARQAEQHKCYLIHVPCCKCELVVQLDIQSTKEELRVVQQLLMGALTVTCPLCASSK

SEQ ID NO: 508 - protein, 463 aa, synthetic construct
  REGION 1..463: note = EF1A2__Homo_sapiens__Q05639
MGKEKTHINIVVIGHVDSGKSTTTGHLIYKCGGIDKRTIEKFEKEAAEMGKGSFKYAWVLDKLKAERERGITIDISLWKFETTKYYITIIDAPGHRDFIKNMITGTSQADCAVLIVAAGVGEFEAGISKNGQTREHALLAYTLGVKQLIVGVNKMDSTEPAYSEKRYDEIVKEVSAYIKKIGYNPATVPFVPISGWHGDNMLEPSPNMPWFKGWKVERKEGNASGVSLLEALDTILPPTRPTDKPLRLPLQDVYKIGGIGTVPVGRVETGILRPGMVVTFAPVNITTEVKSVEMHHEALSEALPGDNVGFNVKNVSVKDIRRGNVCGDSKSDPPQEAAQFTSQVIILNHPGQISAGYSPVIDCHTAHIACKFAELKEKIDRRSGKKLEDNPKSLKSGDAAIVEMVPGKPMCVESFSQYPPLGRFAVRDMRQTVAVGVIKNVEKKSGGAGKVTKSAQKAQKAGK

SEQ ID NO: 509 - protein, 972 aa, synthetic construct
  REGION 1..972: note = EFTUD2/m__Homo_sapiens__Q15029
MDTDLYDEFGNYIGPELDSDEDDDELGRETKDLDEMDDDDDDDDVGDHDDDHPGMEVVLHEDKKYYPTAEEVYGPEVETIVQEEDTQPLTEPIIKPVKTKKFTLMEQTLPVTVYEMDFLADLMDNSELIRNVTLCGHLHHGKTCFVDCLIEQTHPEIRKRYDQDLCYTDILFTEQERGVGIKSTPVTVVLPDTKGKSYLFNIMDTPGHVNFSDEVTAGLRISDGVVLFIDAAEGVMLNTERLIKHAVQERLAVTVCINKIDRLILELKLPPTDAYYKLRHIVDEVNGLISMYSTDENLILSPLLGNVCFSSSQYSICFTLGSFAKIYADTFGDINYQEFAKRLWGDIYFNPKTRKFTKKAPTSSSQRSFVEFILEPLYKILAQVVGDVDTSLPRTLDELGIHLTKEELKLNIRPLLRLVCKKFFGEFTGFVDMCVQHIPSPKVGAKPKIEHTYTGGVDSDLGEAMSDCDPDGPLMCHTTKMYSTDDGVQFHAFGRVLSGTIHAGQPVKVLGENYTLEDEEDSQICTVGRLWISVARYHIEVNRVPAGNWVLIEGVDQPIVKTATITEPRGNEEAQIFRPLKFNTTSVIKIAVEPVNPSELPKMLDGLRKVNKSYPSLTTKVEESGEHVILGTGELYLDCVMHDLRKMYSEIDIKVADPVVTFCETVVETSSLKCFAETPNKKNKITMIAEPLEKGLAEDIENEVVQITWNRKKLGEFFQTKYDWDLLAARSIWAFGPDATGPNILVDDTLPSEVDKALLGSVKDSIVQGFQWGTREGPLCDELIRNVKFKILDAVVAQEPLHRGGGQIIPTARRVVYSAFLMATPRLMEPYYFVEVQAPADCVSAVYTVLARRRGHVTQDAPIPGSPLYTIKAFIPAIDSFGFETDLRTHTQGQAFSLSVFHHWQIVPGDPLDKSIVIRPLEPQPAPHLAREFMIKTRRRKGLSEDVSISKFFDDPMLLELAKQDVVLNYPM

SEQ ID NO: 510 - protein, 657 aa, synthetic construct
  REGION 1..657: note = EGFR__Homo_sapiens__A0A0B4J1Y5
MRPSGTAGAALLALLAALCPASRALEEKKVCQGTSNKLTQLGTFEDHFLSLQRMFNNCEVVLGNLEITYVQRNYDLSFLKTIQEVAGYVLIALNTVERIPLENLQIIRGNMYYENSYALAVLSNYDANKTGLKELPMRNLQEILHGAVRFSNNPALCNVESIQWRDIVSSDFLSNMSMDFQNHLGSCQKCDPSCPNGSCWGAGEENCQKLTKIICAQQCSGRCRGKSPSDCCHNQCAAGCTGPRESDCLVCRKFRDEATCKDTCPPLMLYNPTTYQMDVNPEGKYSFGATCVKKCPRNYVVTDHGSCVRACGADSYEMEEDGVRKCKKCEGPCRKVCNGIGIGEFKDSLSINATNIKHFKNCTSISGDLHILPVAFRGDSFTHTPPLDPQELDILKTVKEITGFLLIQAWPENRTDLHAFENLEIIRGRTKQHGQFSLAVVSLNITSLGLRSLKEISDGDVIISGNKNLCYANTINWKKLFGTSGQKTKIISNRGENSCKATGQVCHALCSPEGCWGPEPRDCVSCRNVSRGRECVDKCNLLEGEPREFVENSECIQCHPECLPQAMNITCTGRGPDNCIQCAHYIDGPHCVKTCPAGVMGENNTLVWKYADAGHVCHLCHPNCTYGCTGPGLEGCPTNGSYIVSHFPRSFYKMSVH

SEQ ID NO: 511 - protein, 1136 aa, synthetic construct
  REGION 1..1136: note = EGFR__Homo_sapiens__E7BSV0
MRPSGTAGAALLALLAALCPASRALEEKKVCQGTSNKLTQLGTFEDHFLSLQRMFNNCEVVLGNLEITYVQRNYDLSFLKTIQEVAGYVLIALNTVERIPLENLQIIRGNMYYENSYALAVLSNYDANKTGLKELPMRNLQEILHGAVRFSNNPALCNVESIQWRDIVSSDFLSNMSMDFQNHLGSCQKCDPSCPNGSCWGAGEENCQKLTKIICAQQCSGRCRGKSPSDCCHNQCAAGCTGPRESDCLVCRKFRDEATCKDTCPPLMLYNPTTYQMDVNPEGKYSFGATCVKKCPRNYVVTDHGSCVRACGADSYEMEEDGVRKCKKCEGPCRKVCNGIGIGEFKDSLSINATNIKHFKNCTSISGDLHILPVAFRGDSFTHTPPLDPQELDILKTVKEITGFLLIQAWPENRTDLHAFENLEIIRGRTKQHGQFSLAVVSLNITSLGLRSLKEISDGDVIISGNKNLCYANTINWKKLFGTSGQKTKIISNRGENSCKATGQVCHALCSPEGCWGPEPRDCVSCRNVSRGRECVDKCNLLEGEPREFVENSECIQCHPECLPQAMNITCTGRGPDNCIQCAHYIDGPHCVKTCPAGVMGENNTLVWKYADAGHVCHLCHPNCTYGCTGPGLEGCPTNGPKIPSIATGMVGALLLLLVVALGIGLFMRRRHIVRKRTLRRLLQERELVEPLTPSGEAPNQALLRILKETEFKKIKVLGSGAFGTVYKGLWIPEGEKVKIPVAIKELREATSPKANKEILDEAYVMASVDNPHVCRLLGICLTSTVQLITQLMPFGCLLDYVREHKDNIGSQYLLNWCVQIAKGMNYLEDRRLVHRDLAARNVLVKTPQHVKITDFGLAKLLGAEEKEYHAEGGKVPIKWMALESILHRIYTHQSDVWSYGVTVWELMTFGSKPYDGIPASEISSILEKGERLPQPPICTIDVYMIMVKCWMIDADSRPKFRELIIEFSKMARDPQRYLVIQGDERMHLPSPTDSNFYRALMDEEDMDDVVDADEYLIPQQGFFSSPSTSRTPLLSSLSATSNNSTVACIDRNGLQSCPIKEDSFLQRYSSDPTGALTEDSIDDTFLPVPGEWLVWKQSCSSTSSTHSAAASLQCPSQVLPPASPEGETVADLQTQ

SEQ ID NO: 512 - protein, 49 aa, synthetic construct
  REGION 1..49: note = EGFR__Homo_sapiens__L0R6G1
MCATCAIQTAPTGPNKSSLSDFSLPLKLHFLSTISISPFASNKVLTLFI

SEQ ID NO: 513 - protein, 405 aa, synthetic construct
  REGION 1..405: note = EGFR__Homo_sapiens__P00533-2
MRPSGTAGAALLALLAALCPASRALEEKKVCQGTSNKLTQLGTFEDHFLSLQRMFNNCEVVLGNLEITYVQRNYDLSFLKTIQEVAGYVLIALNTVERIPLENLQIIRGNMYYENSYALAVLSNYDANKTGLKELPMRNLQEILHGAVRFSNNPALCNVESIQWRDIVSSDFLSNMSMDFQNHLGSCQKCDPSCPNGSCWGAGEENCQKLTKIICAQQCSGRCRGKSPSDCCHNQCAAGCTGPRESDCLVCRKFRDEATCKDTCPPLMLYNPTTYQMDVNPEGKYSFGATCVKKCPRNYVVTDHGSCVRACGADSYEMEEDGVRKCKKCEGPCRKVCNGIGIGEFKDSLSINATNIKHFKNCTSISGDLHILPVAFRGDSFTHTPPLDPQELDILKTVKEITGLS

SEQ ID NO: 514 - protein, 1210 aa, synthetic construct [sequence omitted]

SEQ ID NO: 515 - protein, 464 aa, synthetic construct [sequence omitted]

SEQ ID NO: 516 - protein, 1091 aa, synthetic construct
  REGION 1..1091: note = EGFR__Homo_sapiens__Q504U8
MRPSGTAGAALLALLAALCPASRALEEKKVCQGTSNKLTQLGTFEDHFLSLQRMFNNCEVVLGNLEITYVQRNYDLSFLKTIQEVAGYVLIALNTVERIPLENLQIIRGNMYYENSYALAVLSNYDANKTGLKELPMRNLQGQKCDPSCPNGSCWGAGEENCQKLTKIICAQQCSGRCRGKSPSDCCHNQCAAGCTGPRESDCLVCRKFRDEATCKDTCPPLMLYNPTTYQMDVNPEGKYSFGATCVKKCPRNYVVTDHGSCVRACGADSYEMEEDGVRKCKKCEGPCRKVCNGIGIGEFKDSLSINATNIKHFKNCTSISGDLHILPVAFRGDSFTHTPPLDPQELDILKTVKEITGFLLIQAWPENRTDLHAFENLEIIRGRTKQHGQFSLAVVSLNITSLGLRSLKEISDGDVIISGNKNLCYANTINWKKLFGTSGQKTKIISNRGENSCKATGQVCHALCSPEGCWGPEPRDCVSCRNVSRGRECVDKCNLLEGEPREFVENSECIQCHPECLPQAMNITCTGRGPDNCIQCAHYIDGPHCVKTCPAGVMGENNTLVWKYADAGHVCHLCHPNCTYGCTGPGLEGCPTNGPKIPSIATGMVGALLLLLVVALGIGLFMRRRHIVRKRTLRRLLQERELVEPLTPSGEAPNQALLRILKETEFKKIKVLGSGAFGTVYKGLWIPEGEKVKIPVAIKELREATSPKANKEILDEAYVMASVDNPHVCRLLGICLTSTVQLITQLMPFGCLLDYVREHKDNIGSQYLLNWCVQIAKGMNYLEDRRLVHRDLAARNVLVKTPQHVKITDFGLAKLLGAEEKEYHAEGGKVPIKWMALESILHRIYTHQSDVWSYGVTVWELMTFGSKPYDGIPASEISSILEKGERLPQPPICTIDVYMIMVKCWMIDADSRPKFRELIIEFSKMARDPQRYLVIQGDERMHLPSPTDSNFYRALMDEEDMDDVVDADEYLIPQQGFFSSPSTSRTPLLSSLSATSNNSTVACIDRNGLQSCPIKEDSFLQRYSSDPTGALTEDSIDDTFLPVPGEWLVWKQSCSSTSSTHSAAASLQCPSQVLPPASPEGETVADLQTQ

SEQ ID NO: 517 - protein, 71 aa, synthetic construct
  REGION 1..71: note = EGFR__Homo_sapiens__Q8NDU8
MRPSGTAGAALLALLAALCPASRALEEKKGKGVSRRLPRRPRIAPRTPQPAQPRTGAPARARAPARPFLFP

SEQ ID NO: 518 - protein, 239 aa, synthetic construct
  REGION 1..239: note = EGLN3__Homo_sapiens__Q9H6Z9
MPLGHIMRLDLEKIALEYIVPCLHEVGFCYLDNFLGEVVGDCVLERVKQLHCTGALRDGQLAGPRAGVSKRHLRGDQITWIGGNEEGCEAISFLLSLIDRLVLYCGSRLGKYYVKERSKAMVACYPGNGTGYVRHVDNPNGDGRCITCIYYLNKNWDAKLHGGILRIFPEGKSFIADVEPIFDRLLFFWSDRRNPHEVQPSYATRYAMTVWYFDAEERAEAKKKFRNLTRKTESALTED

SEQ ID NO: 519 - protein, 521 aa, synthetic construct
  REGION 1..521: note = ELF2/m__Homo_sapiens__B7Z720
MATSLHEGPTNQLDLLIRAVEASVHSSNAHCTDKTIEAAEALLHMESPTCLRDSRSPEFIHAAMRPDVITETVVEVSTEESEPMDTSPIPTSPDSHEPMKKKKVGRKPKTQQSPISNGSPELGIKKKPREGKGNTTYLWEFLLDLLQDKNTCPRYIKWTQREKGIFKLVDSKAVSKLWGKHKNKPDMNYETMGRALRYYYQRGILAKVEGQRLVYQFKDMPKNIVVIDDDKSETCNEDLAGTTDEKSLERVSLSAESLLKAASSVRSGKNSSPINCSRAEKGVARVVNITSPGHDASSRSPTTTASVSATAAPRTVRVAMQVPVVMTSLGQKISTVAVQSVNAGAPLITSTSPTTATSPKVVIQTIPTVMPASTENGDKITMQPAKIITIPATQLAQCQLQTKSNLTGSGSINIVGTPLAVRALTPVSIAHGTPVMRLSMPTQQASGQTPPRVISAVIKGPEVKSEAVAKKQEHDVKTLQLVEEKPADGNKTVTHVVVVSAPSAIALPVTMKTEGLVTCEK

SEQ ID NO: 520 - protein, 269 aa, synthetic construct
  REGION 1..269: note = EMMPRIN__Homo_sapiens__Q54A51
MAAALFVLLGFALLGTHGASGAAGTVFTTVEDLGSKILLTCSLNDSATEVTGHRWLKGGVVLKEDALPGQKTEFKVDSDDQWGEYSCVFLPEPMGTANIQLHGPPRVKAVKSSEHINEGETAMLVCKSESVPPVTDWAWYKITDSEDKALMNGSESRFFVSSSQGRSELHIENLNMEADPGQYRCNGTSSKGSDQAIITLRVRSHLAALWPFLGIVAEVLVLVTIIFIYEKRRKPEDVLDDDDAGSAPLKSSGQHQNDKGKNVRQRNSS

SEQ ID NO: 521 - protein, 314 aa, synthetic construct
  REGION 1..314: note = EpCam__Homo_sapiens__P16422
MAPPQVLAFGLLLAAATATFAAAQEECVCENYKLAVNCFVNNNRQCQCTSVGAQNTVICSKLAAKCLVMKAEMNGSKLGRRAKPEGALQNNDGLYDPDCDESGLFKAKQCNGTSMCWCVNTAGVRRTDKDTEITCSERVRTYWIIIELKHKAREKPYDSKSLRTALQKEITTRYQLDPKFITSILYENNVITIDLVQNSSQKTQNDVDIADVAYYFEKDVKGESLFHSKKMDLTVNGEQLDLDPGQTLIYYVDEKAPEFSMQGLKAGVIAVIVVVVIAVVAGIVVLVISRKKRMAKYEKAEIKEMGEMHRELNA

SEQ ID NO: 522 - protein, 976 aa, synthetic construct
  REGION 1..976: note = EphA2__Homo_sapiens__P29317
MELQAARACFALLWGCALAAAAAAQGKEVVLLDFAAAGGELGWLTHPYGKGWDLMQNIMNDMPIYMYSVCNVMSGDQDNWLRTNWVYRGEAERIFIELKFTVRDCNSFPGGASSCKETFNLYYAESDLDYGTNFQKRLFTKIDTIAPDEITVSSDFEARHVKLNVEERSVGPLTRKGFYLAFQDIGACVALLSVRVYYKKCPELLQGLAHFPETIAGSDAPSLATVAGTCVDHAVVPPGGEEPRMHCAVDGEWLVPIGQCLCQAGYEKVEDACQACSPGFFKFEASESPCLECPEHTLPSPEGATSCECEEGFFRAPQDPASMPCTRPPSAPHYLTAVGMGAKVELRWTPPQDSGGREDIVYSVTCEQCWPESGECGPCEASVRYSEPPHGLTRTSVTVSDLEPHMNYTFTVEARNGVSGLVTSRSFRTASVSINQTEPPKVRLEGRSTTSLSVSWSIPPPQQSRVWKYEVTYRKKGDSNSYNVRRTEGFSVTLDDLAPDTTYLVQVQALTQEGQGAGSKVHEFQTLSPEGSGNLAVIGGVAVGVVLLLVLAGVGFFIHRRRKNQRARQSPEDVYFSKSEQLKPLKTYVDPHTYEDPNQAVLKFTTEIHPSCVTRQKVIGAGEFGEVYKGMLKTSSGKKEVPVAIKTLKAGYTEKQRVDFLGEAGIMGQFSHHNIIRLEGVISKYKPMMIITEYMENGALDKFLREKDGEFSVLQLVGMLRGIAAGMKYLANMNYVHRDLAARNILVNSNLVCKVSDFGLSRVLEDDPEATYTTSGGKIPIRWTAPEAISYRKFTSASDVWSFGIVMWEVMTYGERPYWELSNHEVMKAINDGFRLPTPMDCPSAIYQLMMQCWQQERARRPKFADIVSILDKLIRAPDSLKTLADFDPRVSIRLPSTSGSEGVPFRTVSEWLESIKMQQYTEHFMAAGYTAIEKVVQMTNDDIKRIGVRLPGHQKRIAYSLLGLKDQVNTVGIPI

SEQ ID NO: 523 - protein, 983 aa, synthetic construct
  REGION 1..983: note = EphA3__Homo_sapiens__P29320
MDCQLSILLLLSCSVLDSFGELIPQPSNEVNLLDSKTIQGELGWISYPSHGWEEISGVDEHYTPIRTYQVCNVMDHSQNNWLRTNWVPRNSAQKIYVELKFTLRDCNSIPLVLGTCKETFNLYYMESDDDHGVKFREHQFTKIDTIAADESFTQMDLGDRILKLNTEIREVGPVNKKGFYLAFQDVGACVALVSVRVYFKKCPFTVKNLAMFPDTVPMDSQSLVEVRGSCVNNSKEEDPPRMYCSTEGEWLVPIGKCSCNAGYEERGFMCQACRPGFYKALDGNMKCAKCPPHSSTQEDGSMNCRCENNYFRADKDPPSMACTRPPSSPRNVISNINETSVILDWSWPLDTGGRKDVTFNIICKKCGWNIKQCEPCSPNVRFLPRQFGLTNTTVTVTDLLAHTNYTFEIDAVNGVSELSSPPRQFAAVSITTNQAAPSPVLTIKKDRTSRNSISLSWQEPEHPNGIILDYEVKYYEKQEQETSYTILRARGTNVTISSLKPDTIYVFQIRARTAAGYGTNSRKFEFETSPDSFSISGESSQVVMIAISAAVAIILLTVVIYVLIGRFCGYKSKHGADEKRLHFGNGHLKLPGLRTYVDPHTYEDPTQAVHEFAKELDATNISIDKVVGAGEFGEVCSGRLKLPSKKEISVAIKTLKVGYTEKQRRDFLGEASIMGQFDHPNIIRLEGVVTKSKPVMIVTEYMENGSLDSFLRKHDAQFTVIQLVGMLRGIASGMKYLSDMGYVHRDLAARNILINSNLVCKVSDFGLSRVLEDDPEAAYTTRGGKIPIRWTSPEAIAYRKFTSASDVWSYGIVLWEVMSYGERPYWEMSNQDVIKAVDEGYRLPPPMDCPAALYQLMLDCWQKDRNNRPKFEQIVSILDKLIRNPGSLKIITSAAARPSNLLLDQSNVDITTFRTTGDWLNGVWTAHCKEIFTGVEYSSCDTIAKISTDDMKKVGVTVVGPQKKIISSIKALETQSKNGPVPV

SEQ ID NO: 524 - protein, 983 aa, synthetic construct [sequence omitted]

SEQ ID NO: 525 - protein, 462 aa, synthetic construct
  REGION 1..462: note = ErbB3__Homo_sapiens__B3KWG5
MPMSTILPVTSPCLPATGVTVWELMTFGAEPYAGLRLAEVPDLLEKGERLAQPQICTIDVYMVMVKCWMIDENIRPTFKELANEFTRMARDPPRYLVIKRESGPGIAPGPEPHGLTNKKLEEVELEPELDLDLDLEAEEDNLATTTLGSALSLPVGTLNRPRGSQSLLSPSSGYMPMNQGNLGESCQESAVSGSSERCPRPVSLHPMPRGCLASESSEGHVTGSEAELQEKVSMCRSRSRSRSPRPRGDSAYHSQRHSLLTPVTPLSPPGLEEEDVNGYVMPDTHLKGTPSSREGTLSSVGLSSVLGTEEEDEDEEYEYMNRRRRHSPPHPPRPSSLEELGYEYMDVGSDLSASLGSTQSCPLHPVPIMPTAGTTPDEDYEYMNRQRDGGGPGGDYAAMGACPASEQGYEEMRAFQGPGHQAPHVHYARLKTLRSLEATDSAFDNPDYWHSRLFPKANAQRT

SEQ ID NO: 526 - protein, 921 aa, synthetic construct
  REGION 1..921: note = ErbB3__Homo_sapiens__B4DGQ7
MRANDALQVLGLLFSLARGSEVGNSQAVCPGTLNGLSVTGDAENQYQTLYKLYERCEVVMGNLEIVLTGHNADLSFLQWIREVTGYVLVAMNEFSTLPLPNLRVVRGTQVYDGKFAIFVMLNYNTNSSHALRQLRLTQLTEILSGGVYIEKNDKLCHMDTIDWRDIVRDRDAEIVVKDNGRSCPPCHEVCKGRCWGPGSEDCQTLTKTICAPQCNGHCFGPNPNQCCHDECAGGCSGPQDTDCFACRHFNDSGACVPRCPQPLVYNKLTFQLEPNPHTKYQYGGVCVASCPHNFVVDQTSCVRACPPDKMEVDKNGLKMCEPCGGLCPKACEGTGSGSRFQTVDSSNIDGFVNCTKILGNLDFLITGLNGDPWHKIPALDPEKLNVFRTVREITGYLNIQSWPPHMHNFSVFSNLTTIGGRSLYNRGFSLLIMKNLNVTSLGFRSLKEISAGRIYISANRQLCYHHSLNWTKVLRGPTEERLDIKHNRPRRDCVAEGKVCDPLCSSGGCWGPGPGQCLSCRNYSRGGVCVTHCNFLNGEPREFAHEAECFSCHPECQPMEGTATCNGSGSDTCAQCAHFRDGPHCVSSCPHGVLGAKGPIYKYPDVQNECRPCHENCTQGCKGPELQDCLGQTLVLIGKTHLTMALTVIAGLVVIFMMLGGTFLYWRGRRIQNKRAMRRYLERGESIEPLDPSEKANKVLARIFKETELRKLKVLGSGVFGTVHKGVWIPEGESIKIPVCIKVIEDKSGRQSFQAVTDHMLAIGSLDHAHIVRLLGLCPGSSLQLVTQYLPLGSLLDHVRQHRGALGPQLLLNWGVQIAKGMYYLEEHGMVHRNLAARNVLLKSPSQVQVADFGVADLLPPDDKQLLYSEAKTPIKWMALESIHFGKYTHQSDVWSYGQCIWMPSLPSLAPVSNLPFETPS

SEQ ID NO: 527 - protein, 1308 aa, synthetic construct
  REGION 1..1308: note = ERBB4__Homo_sapiens__Q15303
MKPATGLWVWVSLLVAAGTVQPSDSQSVCAGTENKLSSLSDLEQQYRALRKYYENCEVVMGNLEITSIEHNRDLSFLRSVREVTGYVLVALNQFRYLPLENLRIIRGTKLYEDRYALAIFLNYRKDGNFGLQELGLKNLTEILNGGVYVDQNKFLCYADTIHWQDIVRNPWPSNLTLVSTNGSSGCGRCHKSCTGRCWGPTENHCQTLTRTVCAEQCDGRCYGPYVSDCCHRECAGGCSGPKDTDCFACMNFNDSGACVTQCPQTFVYNPTTFQLEHNFNAKYTYGAFCVKKCPHNFVVDSSSCVRACPSSKMEVEENGIKMCKPCTDICPKACDGIGTGSLMSAQTVDSSNIDKFINCTKINGNLIFLVTGIHGDPYNAIEAIDPEKLNVFRTVREITGFLNIQSWPPNMTDFSVFSNLVTIGGRVLYSGLSLLILKQQGITSLQFQSLKEISAGNIYITDNSNLCYYHTINWTTLFSTINQRIVIRDNRKAENCTAEGMVCNHLCSSDGCWGPGPDQCLSCRRFSRGRICIESCNLYDGEFREFENGSICVECDPQCEKMEDGLLTCHGPGPDNCTKCSHFKDGPNCVEKCPDGLQGANSFIFKYADPDRECHPCHPNCTQGCNGPTSHDCIYYPWTGHSTLPQHARTPLIAAGVIGGLFILVIVGLTFAVYVRRKSIKKKRALRRFLETELVEPLTPSGTAPNQAQLRILKETELKRVKVLGSGAFGTVYKGIWVPEGETVKIPVAIKILNETTGPKANVEFMDEALIMASMDHPHLVRLLGVCLSPTIQLVTQLMPHGCLLEYVHEHKDNIGSQLLLNWCVQIAKGMMYLEERRLVHRDLAARNVLVKSPNHVKITDFGLARLLEGDEKEYNADGGKMPIKWMALECIHYRKFTHQSDVWSYGVTIWELMTFGGKPYDGIPTREIPDLLEKGERLPQPPICTIDVYMVMVKCWMIDADSRPKFKELAAEFSRMARDPQRYLVIQGDDRMKLPSPNDSKFFQNLLDEEDLEDMMDAEEYLVPQAFNIPPPIYTSRARIDSNRSEIGHSPPPAYTPMSGNQFVYRDGGFAAEQGVSVPYRAPTSTIPEAPVAQGATAEIFDDSCCNGTLRKPVAPHVQEDSSTQRYSADPTVFAPERSPRGELDEEGYMTPMRDKPKQEYLNPVEENPFVSRRKNGDLQALDNPEYHNASNGPPKAEDEYVNEPLYLNTFANTLGKAEYLKNNILSMPEKAKKAFDNPDYWNHSLPPRSTLQHPDYLQEYSTKYFYKQNGRIRPIVAENPEYLSEFSLKPGTVLPPPPYRHRNTVV

SEQ ID NO: 528 - protein, 486 aa, synthetic construct
  REGION 1..486: note = ERG__Homo_sapiens__P11308
MIQTVPDPAAHIKEALSVVSEDQSLFECAYGTPHLAKTEMTASSSSDYGQTSKMSPRVPQQDWLSQPPARVTIKMECNPSQVNGSRNSPDECSVAKGGKMVGSPDTVGMNYGSYMEEKHMPPPNMTTNERRVIVPADPTLWSTDHVRQWLEWAVKEYGLPDVNILLFQNIDGKELCKMTKDDFQRLTPSYNADILLSHLHYLRETPLPHLTSDDVDKALQNSPRLMHARNTGGAAFIFPNTSVYPEATQRITTRPDLPYEPPRRSAWTGHGHPTPQSKAAQPSPSTVPKTEDQRPQLDPYQILGPTSSRLANPGSGQIQLWQFLLELLSDSSNSSCITWEGTNGEFKMTDPDEVARRWGERKSKPNMNYDKLSRALRYYYDKNIMTKVHGKRYAYKFDFHGIAQALQPHPPESSLYKYPSDLPYMGSYHAHPQKMNFVAPHPPALPVTSSSFFAAPNPYWNSPTGGIYPNTRLPTSHMPSHLGTYY

SEQ ID NO: 529 - protein, 452 aa, synthetic construct
  REGION 1..452: note = ETV6__Homo_sapiens__P41212
MSETPAQCSIKQERISYTPPESPVPSYASSTPLHVPVPRALRMEEDSIRLPAHLRLQPIYWSRDDVAQWLKWAENEFSLRPIDSNTFEMNGKALLLLTKEDFRYRSPHSGDVLYELLQHILKQRKPRILFSPFFHPGNSIHTQPEVILHQNHEEDNCVQRTPRPSVDNVHHNPPTIELLHRSRSPITTNHRPSPDPEQRPLRSPLDNMIRRLSPAERAQGPRPHQENNHQESYPLSVSPMENNHCPASSESHPKPSSPRQESTRVIQLMPSPIMHPLILNPRHSVDFKQSRLSEDGLHREGKPINLSHREDLAYMNHIMVSVSPPEEHAMPIGRIADCRLLWDYVYQLLSDSRYENFIRWEDKESKIFRIVDPNGLARLWGNHKNRTNMTYEKMSRALRHYYKLNIIRKEPGQRLLFRFMKTPDEIMSGRTDRLEHLESQELDEQIYQEDEC

SEQ ID NO: 530 - protein, 656 aa, synthetic construct
  REGION 1..656: note = EWS__Homo_sapiens__Q01844
MASTDYSTYSQAAAQQGYSAYTAQPTQGYAQTTQAYGQQSYGTYGQPTDVSYTQAQTTATYGQTAYATSYGQPPTGYTTPTAPQAYSQPVQGYGTGAYDTTTATVTTTQASYAAQSAYGTQPAYPAYGQQPAATAPTRPQDGNKPTETSQPQSSTGGYNQPSLGYGQSNYSYPQVPGSYPMQPVTAPPSYPPTSYSSTQPTSYDQSSYSQQNTYGQPSSYGQQSSYGQQSSYGQQPPTSYPPQTGSYSQAPSQYSQQSSSYGQQSSFRQDHPSSMGVYGQESGGFSGPGENRSMSGPDNRGRGRGGFDRGGMSRGGRGGGRGGMGSAGERGGFNKPGGPMDEGPDLDLGPPVDPDEDSDNSAIYVQGLNDSVTLDDLADFFKQCGVVKMNKRTGQPMIHIYLDKETGKPKGDATVSYEDPPTAKAAVEWFDGKDFQGSKLKVSLARKKPPMNSMRGGLPPREGRGMPPPLRGGPGGPGGPGGPMGRMGGRGGDRGGFPPRGPRGSRGNPSGGGNVQHRAGDWQCPNPGCGNQNFAWRTECNQCKAPKPEGFLPPPFPPPGGDRGRGGPGGMRGGRGGLMDRGGPGGMFRGGRGGDRGGFRGGRGMDRGGFGGGRRGGPGGPPGPLMEQMGGRRGGRGGPGKMDKGEHRQERRDRPY

SEQ ID NO: 531 - protein, 665 aa, synthetic construct
  REGION 1..665: note = EZH2__Homo_sapiens__F2YMM1
MGQTGKKSEKGPVCWRKRVKSEYMRLRQLKRFRRADEVKSMFSSNRQKILERTEILNQEWKQRRIQPVHILTSVSSLRGTREVEDETVLHNIPYMGDEVLDQDGTFIEELIKNYDGKVHGDRECGFINDEIFVELVNALGQYNDDDDDDDGDDPEEREEKQKDLEDHRDDKESRPPRKFPSDKIFEAISSMFPDKGTAEELKEKYKELTEQQLPGALPPECTPNIDGPNAKSVQREQSLHSFHTLFCRRCFKYDCFLHPFHATPNTYKRKNTETALDNKPCGPQCYQHLEGAKEFAAALTAERIKTPPKRPGGRRRGRLPNNSSRPSTPTINVLESKDTDSDREAGTETGGENNDKEEEEKKDETSSSSEANSRCQTPIKMKPNIEPPENVEWSGAEASMFRVLIGTYYDNFCAIARLIGTKTCRQVYEFRVKESSIIAPAPAEDVDTPPRKKKRKHRLWAAHCRKIQLKKGQNRFPGCRCKAQCNTKQCPCYLAVRECDPDLCLTCGAADHWDSKNVSCKNCSIQRGSKKHLLLAPSDVAGWGIFIKDPVQKNEFISEYCGEIISQDEADRRGKVYDKYMCSFLFNLNNDFVVDATRKGNKIRFANHSVNPNCYAKVMMVNGDHRIGIFAKRAIQTGEELFFDYRYSQADALKYVGIEREMEIP

SEQ ID NO: 532 - protein, 334 aa, synthetic construct
  REGION 1..334: note = EZH2__Homo_sapiens__G3XAL2
MGQTGKKSEKGPVCWRKRVKSEYMRLRQLKRFRRADEVKSMFSSNRQKILERTEILNQEWKQRRIQPVHILTSVSSLRGTRECSVTSDLDFPTQVIPLKTLNAVASVPIMYSWSPLQQNFMVEDETVLHNIPYMGDEVLDQDGTFIEELIKNYDGKVHGDRECGFINDEIFVELVNALGQYNDDDDDDDGDDPEEREEKQKDLEDHRDDKESRPPRKFPSDKIFEAISSMFPDKGTAEELKEKYKELTEQQLPGALPPECTPNIDGPNAKSVQREQSLHSFHTLFCRRCFKYDCFLHPFHATPNTYKRKNTETALDNKPCGPQCYQHLPLLPRN

SEQ ID NO: 533 - protein, 64 aa, synthetic construct
  REGION 1..64: note = EZH2__Homo_sapiens__L0R855
MPLVNIMMMTMMMMETILKKEKKSRKIWRITEMIKKAAHLGNFLLIKFLKPFPQCFQIRAQQKN

SEQ ID NO: 534 - protein, 746 aa, synthetic construct
  REGION 1..746: note = EZH2__Homo_sapiens__Q15910
MGQTGKKSEKGPVCWRKRVKSEYMRLRQLKRFRRADEVKSMFSSNRQKILERTEILNQEWKQRRIQPVHILTSVSSLRGTRECSVTSDLDFPTQVIPLKTLNAVASVPIMYSWSPLQQNFMVEDETVLHNIPYMGDEVLDQDGTFIEELIKNYDGKVHGDRECGFINDEIFVELVNALGQYNDDDDDDDGDDPEEREEKQKDLEDHRDDKESRPPRKFPSDKIFEAISSMFPDKGTAEELKEKYKELTEQQLPGALPPECTPNIDGPNAKSVQREQSLHSFHTLFCRRCFKYDCFLHPFHATPNTYKRKNTETALDNKPCGPQCYQHLEGAKEFAAALTAERIKTPPKRPGGRRRGRLPNNSSRPSTPTINVLESKDTDSDREAGTETGGENNDKEEEEKKDETSSSSEANSRCQTPIKMKPNIEPPENVEWSGAEASMFRVLIGTYYDNFCAIARLIGTKTCRQVYEFRVKESSIIAPAPAEDVDTPPRKKKRKHRLWAAHCRKIQLKKDGSSNHVYNYQPCDHPRQPCDSSCPCVIAQNFCEKFCQCSSECQNRFPGCRCKAQCNTKQCPCYLAVRECDPDLCLTCGAADHWDSKNVSCKNCSIQRGSKKHLLLAPSDVAGWGIFIKDPVQKNEFISEYCGEIISQDEADRRGKVYDKYMCSFLFNLNNDFVVDATRKGNKIRFANHSVNPNCYAKVMMVNGDHRIGIFAKRAIQTGEELFFDYRYSQADALKYVGIEREMEIP

SEQ ID NO: 535 - protein, 707 aa, synthetic construct
  REGION 1..707: note = EZH2__Homo_sapiens__S4S3R8
MGQTGKKSEKGPVCWRKRVKSEYMRLRQLKRFRRADEVKSMFSSNRQKILERTEILNQEWKQRRIQPVHILTSVSSLRGTREVEDETVLHNIPYMGDEVLDQDGTFIEELIKNYDGKVHGDRECGFINDEIFVELVNALGQYNDDDDDDDGDDPEEREEKQKDLEDHRDDKESRPPRKFPSDKIFEAISSMFPDKGTAEELKEKYKELTEQQLPGALPPECTPNIDGPNAKSVQREQSLHSFHTLFCRRCFKYDCFLHPFHATPNTYKRKNTETALDNKPCGPQCYQHLEGAKEFAAALTAERIKTPPKRPGGRRRGRLPNNSSRPSTPTINVLESKDTDSDREAGTETGGENNDKEEEEKKDETSSSSEANSRCQTPIKMKPNIEPPENVEWSGAEASMFRVLIGTYYDNFCAIARLIGTKTCRQVYEFRVKESSIIAPAPAEDVDTPPRKKKRKHRLWAAHCRKIQLKKDGSSNHVYNYQPCDHPRQPCDSSCPCVIAQNFCEKFCQCSSECQNRFPGCRCKAQCNTKQCPCYLAVRECDPDLCLTCGAADHWDSKNVSCKNCSIQRGSKKHLLLAPSDVAGWGIFIKDPVQKNEFISEYCGEIISQDEADRRGKVYDKYMCSFLFNLNNDFVVDATRKGNKIRFANHSVNPNCYAKVMMVNGDHRIGIFAKRAIQTGEELFFDYRYSQADALKYVGIEREMEIP

SEQ ID NO: 536 - protein, 132 aa, synthetic construct
  REGION 1..132: note = FABP7__Homo_sapiens__O15540
MVEAFCATWKLTNSQNFDEYMKALGVGFATRQVGNVTKPTVIISQEGDKVVIRTLSTFKNTEISFQLGEEFDETTADDRNCKSVVSLDGDKLVHIQKWDGKETNFVREIKDGKMVMTLTFGDVVAVRHYEKA

SEQ ID NO: 537 - protein, 254 aa, synthetic construct
  REGION 1..254: note = FCGR3A_Version_1__Homo_sapiens__P08637
MWQLLLPTALLLLVSAGMRTEDLPKAVVFLEPQWYRVLEKDSVTLKCQGAYSPEDNSTQWFHNESLISSQASSYFIDAATVDDSGEYRCQTNLSTLSDPVQLEVHIGWLLLQAPRWVFKEEDPIHLRCHSWKNTALHKVTYLQNGKGRKYFHHNSDFYIPKATLKDSGSYFCRGLFGSKNVSSETVNITITQGLAVSTISSFFPPGYQVSFCLVMVLLFAVDTGLYFSVKTNIRSSTRDWKDHKFKWRKDPQDK

SEQ ID NO: 538 - protein, 290 aa, synthetic construct
  REGION 1..290: note = FCGR3A_Version_2__Homo_sapiens__CCDS1232.1
MGGGAGERLFTSSCLVGLVPLGLRISLVTCPLQCGIMWQLLLPTALLLLVSAGMRTEDLPKAVVFLEPQWYRVLEKDSVTLKCQGAYSPEDNSTQWFHNESLISSQASSYFIDAATVDDSGEYRCQTNLSTLSDPVQLEVHIGWLLLQAPRWVFKEEDPIHLRCHSWKNTALHKVTYLQNGKGRKYFHHNSDFYIPKATLKDSGSYFCRGLFGSKNVSSETVNITITQGLAVSTISSFFPPGYQVSFCLVMVLLFAVDTGLYFSVKTNIRSSTRDWKDHKFKWRKDPQDK

SEQ ID NO: 539 - protein, 268 aa, synthetic construct
  REGION 1..268: note = FGF5__Homo_sapiens__P12034
MSLSFLLLLFFSHLILSAWAHGEKRLAPKGQPGPAATDRNPRGSSSRQSSSSAMSSSSASSSPAASLGSQGSGLEQSSFQWSPSGRRTGSLYCRVGIGFHLQIYPDGKVNGSHEANMLSVLEIFAVSQGIVGIRGVFSNKFLAMSKKGKLHASAKFTDDCKFRERFQENSYNTYASAIHRTEKTGREWYVALNKRGKAKRGCSPRVKPQHISTHFLPRFKQSEQPELSFTVTVPEKKKPPSPIKPKIPLSAPRKNTNSVKYRLKFRFG

SEQ ID NO: 540 - protein, 38 aa, synthetic construct
  REGION 1..38: note = FGF5__Homo_sapiens__Q60518
MSTRCGEAGRARGTQPHRGYRAQNQPYKMHLGPPRLEE

SEQ ID NO: 541 - protein, 821 aa, synthetic construct
  REGION 1..821: note = FGFR2__Homo_sapiens__P21802
MVSWGRFICLVVVTMATLSLARPSFSLVEDTTLEPEEPPTKYQISQPEVYVAAPGESLEVRCLLKDAAVISWTKDGVHLGPNNRTVLIGEYLQIKGATPRDSGLYACTASRTVDSETWYFMVNVTDAISSGDDEDDTDGAEDFVSENSNNKRAPYWTNTEKMEKRLHAVPAANTVKFRCPAGGNPMPTMRWLKNGKEFKQEHRIGGYKVRNQHWSLIMESVVPSDKGNYTCVVENEYGSINHTYHLDVVERSPHRPILQAGLPANASTVVGGDVEFVCKVYSDAQPHIQWIKHVEKNGSKYGPDGLPYLKVLKAAGVNTTDKEIEVLYIRNVTFEDAGEYTCLAGNSIGISFHSAWLTVLPAPGREKEITASPDYLEIAIYCIGVFLIACMVVTVILCRMKNTTKKPDFSSQPAVHKLTKRIPLRRQVTVSAESSSSMNSNTPLVRITTRLSSTADTPMLAGVSEYELPEDPKWEFPRDKLTLGKPLGEGCFGQVVMAEAVGIDKDKPKEAVTVAVKMLKDDATEKDLSDLVSEMEMMKMIGKHKNIINLLGACTQDGPLYVIVEYASKGNLREYLRARRPPGMEYSYDINRVPEEQMTFKDLVSCTYQLARGMEYLASQKCIHRDLAARNVLVTENNVMKIADFGLARDINNIDYYKKTTNGRLPVKWMAPEALFDRVYTHQSDVWSFGVLMWEIFTLGGSPYPGIPVEELFKLLKEGHRMDKPANCTNELYMMMRDCWHAVPSQRPTFKQLVEDLDRILTLTTNEEYLDLSQPLEQYSPSYPDTRSSCSSGDDSVFSPDPMPYEPCLPQYPHINGSVKT

SEQ ID NO: 542 - protein, 635 aa, synthetic construct
  REGION 1..635: note = fibronectin__Homo_sapiens__A0A024R5I6
MAPPLLLLLLASGAAACPLPCVCQNLSESLSTLCAHRGLLFVPPNVDRRTVELRLADNFIQALGPPDFRNMTGLVDLTLSRNAITRIGARAFGDLESLRSLHLDGNRLVELGTGSLRGPVNLQHLILSGNQLGRIAPGAFDDFLESLEDLDLSYNNLRQVPWAGIGAMPALHTLNLDHNLIDALPPGAFAQLGQLSRLDLTSNRLATLAPDPLFSRGRDAEASPAPLVLSFSGNPLHCNCELLWLRRLARPDDLETCASPPGLAGRYFWAVPEGEFSCEPPLIARHTQRLWVLEGQRATLRCRALGDPAPTMHWVGPDDRLVGNSSRARAFPNGTLEIGVTGAGDAGGYTCIATNPAGEATARVELRVLALPHGGNSSAEGGRPGPSDIAASARTAAEGEGTLESEPAVQVTEVTATSGLVSWGPGRPADPVWMFQIQYNSSEDETLIYRIVPASSHHFLLKHLVPGADYDLCLLALSPAAGPSDLTATRLLGCAHFSTLPASPLCHALQAHVLGGTLTVAVGGVLVAALLVFTVALLVRGRGAGNGRLPLKLSHVQSQTNGGPSPTPKAHPPRSPPPRPQRSCSLDLGDAGCYGYARRLGGAWARRSHSVHGGLLGAGCRGVGGSAERLEESVV

SEQ ID NO: 543 - protein, 1098 aa, synthetic construct
  REGION 1..1098: note = fibronectin__Homo_sapiens__A0A024RB01
MPPRQPPRQAGGGLSREFGKLLPALSHSPLGGLGSGSGSVAPGQGRAGAMGSRTPESPLHAVQLRWGPRRRPPLLPLLLLLLPPPPRVGGFNLDAEAPAVLSGPPGSFFGFSVEFYRPGTDGVSVLVGAPKANTSQPGVLQGGAVYLCPWGASPTQCTPIEFDSKGSRLLESSLSSSEGEEPVEYKSLQWFGATVRAHGSSILACAPLYSWRTEKEPLSDPVGTCYLSTDNFTRILEYAPCRSDFSWAAGQGYCQGGFSAEFTKTGRVVLGGPGSYFWQGQILSATQEQIAESYYPEYLINLVQGQLQTRQASSIYDDSYLGYSVAVGEFSGDDTEDFVAGVPKGNLTYGYVTILNGSDIRSLYNFSGEQMASYFGYAVAATDVNGDGLDDLLVGAPLLMDRTPDGRPQEVGRVYVYLQHPAGIEPTPTLTLTGHDEFGRFGSSLTPLGDLDQDGYNDVAIGAPFGGETQQGVVFVFPGGPGGLGSKPSQVLQPLWAASHTPDFFGSALRGGRDLDGNGYPDLIVGSFGVDKAVVYRGRPIVSASASLTIFPAMFNPEERSCSLEGNPVACINLSFCLNASGKHVADSIGFTVELQLDWQKQKGGVRRALFLASRQATLTQTLLIQNGAREDCREMKIYLRNESEFRDKLSPIHIALNFSLDPQAPVDSHGLRPALHYQSKSRIEDKAQILLDCGEDNICVPDLQLEVFGEQNHVYLGDKNALNLTFHAQNVGEGGAYEAELRVTAPPEAEYSGLVRHPGNFSSLSCDYFAVNQSRLLVCDLGNPMKAGASLWGGLRFTVPHLRDTKKTIQFDFQILSKNLNNSQSDVVSFRLSVEAQAQVTLNGVSKPEAVLFPVSDWHPRDQPQKEEDLGPAVHHVYELINQGPSSISQGVLELSCPQALEGQQLLYVTRVTGLNCTTNHPINPKGLELDPEGSLHHQQKREAPSRSSASSGPQILKCPEAECFRLRCELGPLHQQESQSLQLHFRVWAKTFLQREHQPFSLQCEAVYKALKMPYRILPRQLPQKERQVATAVQWTKAEGSYGVPLWIIILAILFGLLLLGLLIYILYKLGFFKRSLPYGTAMEKAQLKPPATSDA

SEQ ID NO: 544 - protein, 1198 aa, synthetic construct
  REGION 1..1198: note = fibronectin__Homo_sapiens__A0A024RDT9
MAEHPPLLDTTQILSSDISLLSAPIVSADGTQQVILVQVNPGEAFTIRREDGQFQCITGPAQVPMMSPNGSVPPIYVPPGYAPQVIEDNGVRRVVVVPQAPEFHPGSHTVLHRSPHPPLPGFIPVPTMMPPPPRHMYSPVTGAGDMTTQYMPQYQSSQVYGDVDAHSTHGRSNFRDERSSKTYERLQKKLKDRQGTQKDKMSSPPSSPQKCPSPINEHNGLIKGQIAGGINTGSAKIKSGKGKGGTQVDTEIEEKDEETKAFEALLSNIVKPVASDIQARTVVLTWSPPSSLINGETDESSVPELYGYEVLISSTGKDGKYKSVYVGEETNITLNDLKPAMDYHAKVQAEYNSIKGTPSEAEIFTTLSCEPDIPNPPRIANRTKNSLTLQWKAPSDNGSKIQNFVLEWDEGKGNGEFCQCYMGSQKQFKITKLSPAMGCKFRLSARNDYGTSGFSEEVLYYTSGCAPSMPASPVLTKAGITWLSLQWSKPSGTPSDEGISYILEMEEETSGYGFKPKYDGEDLAYTVKNLRRSTKYKFKVIAYNSEGKSNPSEVVEFTTCPDKPGIPVKPSVKGKIHSHSFKITWDPPKDNGGATINKYVVEMAEGSNGNKWEMIYSGATREHLCDRLNPGCFYRLRVYCISDGGQSAVSESLLVQTPAVPPGPCLPPRLQGRPKAKEIQLRWGPPLVDGGSPISCYSVEMSPIEKDEPREVYQGSEVECTVSSLLPGKTYSFRLRAANKMGFGPFSEKCDITTAPGPPDQCKPPQVTCRSATCAQVNWEVPLSNGTDVTEYRLEWGGVEGSMQICYCGPGLSYEIKGLSPATTYYCRVQALSVVGAGPFSEVVACVTPPSVPGIVTCLQEISDDEIENPHYSPSTCLAISWEKPCDHGSEILAYSIDFGDKQSLTVGKVTSYIINNLQPDTTYRIRIQALNSLGAGPFSHMIKLKTKPLPPDPPRLECVAFSHQNLKLKWGEGTPKTLSTDSIQYHLQMEDKNGRFVSLYRGPCHTYKVQRLNESTSYKFCIQACNEAGEGPLSQEYIFTTPKSVPAALKAPKIEKVNDHICEITWECLQPMKGDPVIYSLQVMLGKDSEFKQIYKGPDSSFRYSSLQLNCEYRFRVCAIRQCQDSLGHQDLVGPYSTTVLFISQRTEPPASTNRDTVESTRTRRALSDEQCAAVILVLFAFFSILIAFIIQYFVIK

SEQ ID NO: 545 - protein, 1142 aa, synthetic construct
  REGION 1..1142: note = fibronectin__Homo_sapiens__A0A024RDV5
MSGPAQVPMMSPNGSVPPIYVPPGYAPQVIEDNGVRRVVVVPQAPEFHPGSHTVLHRSPHPPLPGFIPVPTMMPPPPRHMYSPVTGAGDMTTQYMPQYQSSQVYGDVDAHSTHGRSNFRDERSSKTYERLQKKLKDRQGTQKDKMSSPPSSPQKCPSPINEHNGLIKGQIAGGINTGSAKIKSGKGKGGTQVDTEIEEKDEETKAFEALLSNIVKPVASDIQARTVVLTWSPPSSLINGETDESSVPELYGYEVLISSTGKDGKYKSVYVGEETNITLNDLKPAMDYHAKVQAEYNSIKGTPSEAEIFTTLSCEPDIPNPPRIANRTKNSLTLQWKAPSDNGSKIQNFVLEWDEGKGNGEFCQCYMGSQKQFKITKLSPAMGCKFRLSARNDYGTSGFSEEVLYYTSGCAPSMPASPVLTKAGITWLSLQWSKPSGTPSDEGISYILEMEEETSGYGFKPKYDGEDLAYTVKNLRRSTKYKFKVIAYNSEGKSNPSEVVEFTTCPDKPGIPVKPSVKGKIHSHSFKITWDPPKDNGGATINKYVVEMAEGSNGNKWEMIYSGATREHLCDRLNPGCFYRLRVYCISDGGQSAVSESLLVQTPAVPPGPCLPPRLQGRPKAKEIQLRWGPPLVDGGSPISCYSVEMSPIEKDEPREVYQGSEVECTVSSLLPGKTYSFRLRAANKMGFGPFSEKCDITTAPGPPDQCKPPQVTCRSATCAQVNWEVPLSNGTDVTEYRLEWGGVEGSMQICYCGPGLSYEIKGLSPATTYYCRVQALSVVGAGPFSEVVACVTPPSVPGIVTCLQEISDDEIENPHYSPSTCLAISWEKPCDHGSEILAYSIDFGDKQSLTVGKVTSYIINNLQPDTTYRIRIQALNSLGAGPFSHMIKLKTKPLPPDPPRLECVAFSHQNLKLKWGEGTPKTLSTDSIQYHLQMEDKNGRFVSLYRGPCHTYKVQRLNESTSYKFCIQACNEAGEGPLSQEYIFTTPKSVPAALKAPKIEKVNDHICEITWECLQPMKGDPVIYSLQVMLGKDSEFKQIYKGPDSSFRYSSLQLNCEYRFRVCAIRQCQDSLGHQDLVGPYSTTVLFISQRTEPPASTNRDTVESTRTRRALSDEQCAAVILVLFAFFSILIAFIIQYFVIK

SEQ ID NO: 546 - protein, 339 aa, synthetic construct
  REGION 1..339: note = fibronectin__Homo_sapiens__A6NH44
MPPSKPHPPVVGKVTHHSIELYWDLEKKAKRQGPQEQWFRFSIEEEDPKMHTYGIIYTGYATKHVVEGLEPRTLYRFRLKVTSPSGECEYSPLVSVSTTREPISSEHLHRAVSVNDEDLLVRILQGGRVKVDVPNKFGFTALMVAAQKGYTRLVKILVSNGTDVNLKNGSGKDSLMLACYAGHLDVVKYLRRHGASWQARDLGGCTALHWAADGGHCSVIEWMIKDGCEVDVVDTGSGWTPLMRVSAVSGNQRVASLLIDAGANVNVKDRNGKTPLMVAVLNNHEELVQLLLDKGADASVKNEFGKGVLEMARVFDRQSVVSLLEERKKKQRPKKSCVC

SEQ ID NO: 547 - protein, 1049 aa, synthetic construct [sequence omitted]

SEQ ID NO: 548 - protein, 1049 aa, synthetic construct [sequence omitted]

SEQ ID NO: 549 - protein, 466 aa, synthetic construct
  REGION 1..466: note = fibronectin__Homo_sapiens__B3KXM5
MLSLRQRMMHARFRNPLSRQPARPSYRQGYNGRPNVEGKVLPGSNGKPNGQRIINGPQGTKWVVDLDRGLVLNAEGRYLQDSHGNPLRIKLGGDGRTIVDLEGTPVVSPDGLPLFGQGRHGTPLANAQDKPILSLGGKPLVGLEVIKKTTHPPTTTMQPTTTTTPLPTTTTPRPTTATTRRTTTRRPTTTVRTTTRTTTTTTPKPTTPIPTCPPGTLERHDDDGNLIMSSNGIPECYAEEDEFSGLETDTAVPTEEAYVIYDEDYEFETSRPPTTTEPSTTATTPRVIPEEGAISSFPEEEFDLAGRKRFVAPYVTYLNKDPSAPCSLTDALDHFQVDSLDEIIPNDLKKSDLPPQHAPRNITVVAVEGCHSFVIVDWDKATPGDVVTGYLVYSASYEDFIRNKWSTQASSVTHLPIENLKPNTRYYFKVQAQNPHGYGPISPSVSFVTESDNPLLVVRPPGGEPI

SEQ ID NO: 550 - protein, 156 aa, synthetic construct
  REGION 1..156: note = fibronectin__Homo_sapiens__B4DIC5
MEEQRNEEIQSFIYSLKQMLLNVEANSAKVQEDLEAEFQSLFSLLEELKEGMLMKIKQDRASRTYELQNQLAACTRALESSEELLETANQTLQAMDSEDFPQAAKQIKDGVTMAPAFRLSLKAKVSDNMSHLMVDFAQERQMLQALKFLPGERGTH

SEQ ID NO: 551 - protein, 306 aa, synthetic construct
  REGION 1..306: note = fibronectin__Homo_sapiens__B4DN21
MIFEEHGFRRTTPPTTATPIRHRPRPYPPNVGQEALSQTTISWAPFQDTSEYIISCHPVGTDEEPLQFRVPGTSTSATLTGLTRGATYNIIVEALKDQQRHKVREEVVTVGNSVNEGLNQPTDDSCFDPYTVSHYAVGDEWERMSESGFKLLCQCLGFGSGHFRCDSSRWCHDNGVNYKIGEKWDRQGENGQMMSCTCLGNGKGEFKCDPHEATCYDDGKTYHVGEQWQKEYLGAICSCTCFGGQRGWRCDNCRRPGGEPSPEGTTGQSYNQYSQRYHQRTNTNVNCPIECFMPLDVQADREDSRE

SEQ ID NO: 552 - protein, 639 aa, synthetic construct [sequence omitted]

SEQ ID NO: 553 - protein, 337 aa, synthetic construct [sequence omitted]

SEQ ID NO: 554 - protein, 1014 aa, synthetic construct [sequence omitted]

SEQ ID NO: 555 - protein, 894 aa, synthetic construct [sequence omitted]

SEQ ID NO: 556 - protein, 383 aa, synthetic construct
  REGION 1..383: note = fibronectin__Homo_sapiens__B7Z3W5
MASAFRLSLKPKVSDNMTHLMVDFSQERQMLQTLKFLPVPKAPEIDPVECLVADNSVTVAWRMPEEDNKIDHFILEHRKTNFDGLPRVKDERCWEIIDNIKGTEYTLSGLKFDSKYMNFRVRACNKAVAGEYSDPVTLETKALNFNLDNSSSHLNLKVEDTCVEWDPTGGKGQESKIKGKENKGSVHVTSLKKHTSGTPSPKRTSVGSRPPAVRGSRDRFTGESYTVLGDTAIESGQHYWEVKAQKDCKSYSVGVAYKTLGKFDQLGKTNTSWCIHVNNWLQNTFAAKHNNKVKALDVTVPEKIGVFCDFDGGQLSFYDANSKQLLYSFKTKFTQPVLPGFMVWCGGLSLSTGMQVPSAVRTLQKSENGMTGSASSLNNVVTQ

SEQ ID NO: 557 - protein, 146 aa, synthetic construct
  REGION 1..146: note = fibronectin__Homo_sapiens__B7Z939
MPPSKPHPPVVGKVTHHSIELYWDLEKKAKRQGPQEQWFRFSIEEEDPKMHTYGIIYTGYATKHVVEGLEPRTLYRFRLKVTSPSGECEYSPLVSVSTTSEYSDRPHSPLSRSMEMTSNLEKIFCLSFGLTRSRNDTIFKHCNNIC

SEQ ID NO: 558 - protein, 684 aa, synthetic construct
  REGION 1..684: note = fibronectin__Homo_sapiens__G5E9X3
MAEHPPLLDTTQILSSDISLLSAPIVSADGTQQVILVQVNPGEAFTIRREDGQFQCITGPAQVPMMSPNGSVPPIYVPPGYAPQVIEDNGVRRVVVVPQAPEFHPGSHTVLHRSPHPPLPGFIPVPTMMPPPPRHMYSPVTGAGDMTTQYMPQYQSSQVYGDVDAHSTHGRSNFRDERSSKTYERLQKKLKDRQGTQKDKMSSPPSSPQKCPSPINEHNGLIKGQIAGGINTGSAKIKSGKGKGGTQVDTEIEEKDEETKAFEALLSNIVKPVASDIQARTVVLTWSPPSSLINGETDESSVPELYGYEVLISSTGKDGKYKSVYVGEETNITLNDLKPAMDYHAKVQAEYNSIKGTPSEAEIFTTLSCEPDIPNPPRIANRTKNSLTLQWKAPSDNGSKIQNFVLEWDEGKGNGEFCQCYMGSQKQFKITKLSPAMGCKFRLSARNDYGTSGFSEEVLYYTSGCAPSMPASPVLTKAGITWLSLQWSKPSGTPSDEGISYILEMEEETSGYGFKPKYDGEDLAYTVKNLRRSTKYKFKVIAYNSEGKSNPSEVVEFTTCPDKPGIPVKPSVKGKIHSHSFKITWDPPKDNGGATINKYVVEMAEGSNGNKWEMIYSGATREHLCDRLNPGCFYRLRVYCISDGGQSAVSESLLVQTPAVPPGPCLPPRLQGRPKAKEIQTPSG

SEQ ID NO: 559 - protein, 163 aa, synthetic construct
  REGION 1..163: note = fibronectin__Homo_sapiens__Q9H382
MSESGFKLLCQCLGFGSGHFRCDSSRWCHDNGVNYKIGEKWDRQGENGQMMSCTCLGNGKGEFKCDPHEATCYDDGKTYHVGEQWQKEYLGAICSCTCFGGQRGWRCDNCRRPGGEPSPEGTTGQSYNQYSQRYHQRTNTNVNCPIECFMPLDVQADREDSRE

SEQ ID NO: 560 - protein, 380 aa, synthetic construct
  REGION 1..380: note = FOS__Homo_sapiens__P01100
MMFSGFNADYEASSSRCSSASPAGDSLSYYHSPADSFSSMGSPVNAQDFCTDLAVSSANFIPTVTAISTSPDLQWLVQPALVSSVAPSQTRAPHPFGVPAPSAGAYSRAGVVKTMTGGRAQSIGRRGKVEQLSPEEEEKRRIRRERNKMAAAKCRNRRRELTDTLQAETDQLEDEKSALQTEIANLLKEKEKLEFILAAHRPACKIPDDLGFPEEMSVASLDLTGGLPEVATPESEEAFTLPLLNDPEPKPSVEPVKSISSMELKTEPFDDFLFPASSRPSGSETARSVPDMDLSGSFYAADWEPLHSGSLGMGPMATELEPLCTPVVTCTPSCTAYTSSFVFTYPEADSFPSCAAAHRKGSSSNEPSSDSLSSPTLLAL

SEQ ID NO: 561 - protein, 431 aa, synthetic construct
  REGION 1..431: note = FOXP3__Homo_sapiens__Q9BZS1
MPNPRPGKPSAPSLALGPSPGASPSWRAAPKASDLLGARGPGGTFQGRDLRGGAHASSSSLNPMPPSQLQLPTLPLVMVAPSGARLGPLPHLQALLQDRPHFMHQLSTVDAHARTPVLQVHPLESPAMISLTPPTTATGVFSLKARPGLPPGINVASLEWVSREPALLCTFPNPSAPRKDSTLSAVPQSSYPLLANGVCKWPGCEKVFEEPEDFLKHCQADHLLDEKGRAQCLLQREMVQSLEQQLVLEKEKLSAMQAHLAGKMALTKASSVASSDKGSCCIVAAGSQGPVVPAWSGPREAPDSLFAVRRHLWGSHGNSTFPEFLHNMDYFKFHNMRPPFTYATLIRWAILEAPEKQRTLNEIYHWFTRMFAFFRNHPATWKNAIRHNLSLHKCFVRVESEKGAVWTVDELEFRKKRSQRPSRCSNPTPGP

SEQ ID NO: 562 - protein, 365 aa, synthetic construct
  REGION 1..365: note = FUT1__Homo_sapiens__P19526
MWLRSHRQLCLAFLLVCVLSVIFFLHIHQDSFPHGLGLSILCPDRRLVTPPVAIFCLPGTAMGPNASSSCPQHPASLSGTWTVYPNGRFGNQMGQYATLLALAQLNGRRAFILPAMHAALAPVFRITLPVLAPEVDSRTPWRELQLHDWMSEEYADLRDPFLKLSGFPCSWTFFHHLREQIRREFTLHDHLREEAQSVLGQLRLGRTGDRPRTFVGVHVRRGDYLQVMPQRWKGVVGDSAYLRQAMDWFRARHEAPVFVVTSNGMEWCKENIDTSQGDVTFAGDGQEATPWKDFALLTQCNHTIMTIGTFGFWAAYLAGGDTVYLANFTLPDSEFLKIFKPEAAFLPEWVGINADLSPLWTLAKP

SEQ ID NO: 563 - protein, 459 aa, synthetic construct
  REGION 1..459: note = G250__Homo_sapiens__Q16790
MAPLCPSPWLPLLIPAPAPGLTVQLLLSLLLLVPVHPQRLPRMQEDSPLGGGSSGEDDPLGEEDLPSEEDSPREEDPPGEEDLPGEEDLPGEEDLPEVKPKSEEEGSLKLEDLPTVEAPGDPQEPQNNAHRDKEGDDQSHWRYGGDPPWPRVSPACAGRFQSPVDIRPQLAAFCPALRPLELLGFQLPPLPELRLRNNGHSVQLTLPPGLEMALGPGREYRALQLHLHWGAAGRPGSEHTVEGHRFPAEIHVVHLSTAFARVDEALGRPGGLAVLAAFLEEGPEENSAYEQLLSRLEEIAEEGSETQVPGLDISALLPSDFSRYFQYEGSLTTPPCAQGVIWTVFNQTVMLSAKQLHTLSDTLWGPGDSRLQLNFRATQPLNGRVIEASFPAGVDSSPRAAEPVQLNSCLAAGDILALVFGLLFAVTSVAFLVQMRRQHRRGTKGGVSYRPAEVAETGA

SEQ ID NO: 564 - protein, 138 aa, synthetic construct
  REGION 1..138: note = GAGE-1__Homo_sapiens__AAA82744
MSWRGRSTYRPRPRRYVEPPEMIGPMRPEQFSDEVEPATPEEGEPATQRQDPAAAQEGEDEGASAGQGPKPEADSQEQGHPQTGCECEDGPDGQEMDPPNPEEVKTPEEEMRSHYVAQTGILWLLMNNCFLNLSPRKP

SEQ ID NO: 565 - protein, 116 aa, synthetic construct
  REGION 1..116: note = GAGE-2__Homo_sapiens__Q6NT46
MSWRGRSTYRPRPRRYVEPPEMIGPMRPEQFSDEVEPATPEEGEPATQRQDPAAAQEGQDEGASAGQGPKPEAHSQEQGHPQTGCECEDGPDGQEMDPPNPEEVKTPEEGEKQSQC

SEQ ID NO: 566 - protein, 118 aa, synthetic construct
  REGION 1..118: note = GAGE-3__Homo_sapiens__Q13067
MNLSRGKSTYYWPRPRRYVQPPEVIGPMRPEQFSDEVEPATPEEGEPATQRQDPAAAQEGEDEGASAGQGPKPEADSQEQGHPQTGCECEDGPDGQEMDPPNPEEVKTPEEGEKQSQC

SEQ ID NO: 567 - protein, 117 aa, synthetic construct
  REGION 1..117: note = GAGE-4__Homo_sapiens__Q13068
MSWRGRSTYYWPRPRRYVQPPEMIGPMRPEQFSDEVEPATPEEGEPATQRQDPAAAQEGEDEGASAGQGPKPEADSQEQGHPQTGCECEDGPDGQEMDPPNPEEVKTPEEGEGQSQC

SEQ ID NO: 568 - protein, 117 aa, synthetic construct
  REGION 1..117: note = GAGE-5__Homo_sapiens__Q13069
MSWRGRSTYYWPRPRRYVQPPEVIGPMRPEQFSDEVEPATPEEGEPATQRQDPAAAQEGEDEGASAGQGPKPEADSQEQGHPQTGCECEDGPDGQEMDPPNPEEVKTPEEGEKQSQC

SEQ ID NO: 569 - protein, 117 aa, synthetic construct
  REGION 1..117: note = GAGE-6__Homo_sapiens__Q13070
MSWRGRSTYYWPRPRRYVQPPEVIGPMRPEQFSDEVEPATPEEGEPATQRQDPAAAQEGEDEGASAGQGPKPEADSQEQGHPQTGCECEDGPDGQEVDPPNPEEVKTPEEGEKQSQC

SEQ ID NO: 570 - protein, 117 aa, synthetic construct
  REGION 1..117: note = GAGE7b__Homo_sapiens__O76087
MSWRGRSTYYWPRPRRYVQPPEMIGPMRPEQFSDEVEPATPEEGEPATQRQDPAAAQEGEDEGASAGQGPKPEAHSQEQGHPQTGCECEDGPDGQEMDPPNPEEVKTPEEGEKQSQC

SEQ ID NO: 571 - protein, 116 aa, synthetic construct
  REGION 1..116: note = GAGE-8_(GAGE-2D)__Homo_sapiens__Q9UEU5
MSWRGRSTYRPRPRRYVEPPEMIGPMRPEQFSDEVEPATPEEGEPATQRQDPAAAQEGEDEGASAGQGPKPEADSQEQGHPQTGCECEDGPDGQEMDPPNPEEVKTPEEGEKQSQC

SEQ ID NO: 572 - protein, 447 aa, synthetic construct
  REGION 1..447: note = GASR__Homo_sapiens__P32239
MELLKLNRSVQGTGPGPGASLCRPGAPLLNSSSVGNLSCEPPRIRGAGTRELELAIRITLYAVIFLMSVGGNMLIIVVLGLSRRLRTVTNAFLLSLAVSDLLLAVACMPFTLLPNLMGTFIFGTVICKAVSYLMGVSVSVSTLSLVAIALERYSAICRPLQARVWQTRSHAARVIVATWLLSGLLMVPYPVYTVVQPVGPRVLQCVHRWPSARVRQTWSVLLLLLLFFIPGVVMAVAYGLISRELYLGLRFDGDSDSDSQSRVRNQGGLPGAVHQNGRCRPETGAVGEDSDGCYVQLPRSRPALELTALTAPGPGSGSRPTQAKLLAKKRVVRMLLVIVVLFFLCWLPVYSANTWRAFDGPGAHRALSGAPISFIHLLSYASACVNPLVYCFMHRRFRQACLETCARCCPRPPRARPRALPDEDPPTPSIASLSRLSYTTISTLGPG

SEQ ID NO: 573 - protein, 741 aa, synthetic construct
  REGION 1..741: note = GnT-V__Homo_sapiens__Q09328
MALFTPWKLSSQKLGFFLVTFGFIWGMMLLHFTIQQRTQPESSSMLREQILDLSKRYIKALAEENRNVVDGPYAGVMTAYDLKKTLAVLLDNILQRIGKLESKVDNLVVNGTGTNSTNSTTAVPSLVALEKINVADIINGAQEKCVLPPMDGYPHCEGKIKWMKDMWRSDPCYADYGVDGSTCSFFIYLSEVENWCPHLPWRAKNPYEEADHNSLAEIRTDFNILYSMMKKHEEFRWMRLRIRRMADAWIQAIKSLAEKQNLEKRKRKKVLVHLGLLTKESGFKIAETAFSGGPLGELVQWSDLITSLYLLGHDIRISASLAELKEIMKKVVGNRSGCPTVGDRIVELIYIDIVGLAQFKKTLGPSWVHYQCMLRVLDSFGTEPEFNHANYAQSKGHKTPWGKWNLNPQQFYTMFPHTPDNSFLGFVVEQHLNSSDIHHINEIKRQNQSLVYGKVDSFWKNKKIYLDIIHTYMEVHATVYGSSTKNIPSYVKNHGILSGRDLQFLLRETKLFVGLGFPYEGPAPLEAIANGCAFLNPKFNPPKSSKNTDFFIGKPTLRELTSQHPYAEVFIGRPHVWTVDLNNQEEVEDAVKAILNQKIEPYMPYEFTCEGMLQRINAFIEKQDFCHGQVMWPPLSALQVKLAEPGQSCKQVCQESQLICEPSFFQHLNKDKDMLKYKVTCQSSELAKDILVPSFDPKNKHCVFQGDLLLFSCAGAHPRHQRVCPCRDFIKGQVALCKDCL

SEQ ID NO: 574 - protein, 580 aa, synthetic construct
  REGION 1..580: note = GPC3__Homo_sapiens__I6QTG3
MAGTVRTACLVVAMLLSLDFPGQAQPPPPPPDATCHQVRSFFQRLQPGLKWVPETPVPGSDLQVCLPKGPTCCSRKMEEKYQLTARLNMEQLLQSASMELKFLIIQNAAVFQEAFEIVVRHAKNYTNAMFKNNYPSLTPQAFEFVGEFFTDVSLYILGSDINVDDMVNELFDSLFPVIYTQLMNPGLPDSALDINECLRGARRDLKVFGNFPKLIMTQVSKSLQVTRIFLQALNLGIEVINTTDHLKFSKDCGRMLTRMWYCSYCQGLMMVKPCGGYCNVVMQGCMAGVVEIDKYWREYILSLEELVNGMYRIYDMENVLLGLFSTIHDSIQYVQKNAGKLTTTIGKLCAHSQQRQYRSAYYPEDLFIDKKVLKVAHVEHEETLSSRRRELIQKLKSFISFYSALPGYICSHSPVAENDTLCWNGQELVERYSQKAARNGMKNQFNLHELKMKGPEPVVSQIIDKLKHINQLLRTMSMPKGRVLDKNLDEEGFESGDCGDDEDECIGGSGDGMIKVKNQLRFLAELAYDLDVDDAPGNSQQATPKDNEISTFHNLGNVHSPLKLLTSMAISVVCFFFLVH

SEQ ID NO: 575 - protein, 580 aa, synthetic construct; identical to SEQ ID NO: 574
  REGION 1..580: note = GPC3__Homo_sapiens__P51654

SEQ ID NO: 576 - protein, 580 aa, synthetic construct [sequence omitted]

SEQ ID NO: 577 - protein, 560 aa, synthetic construct
  REGION 1..560: note = GPNMB/m__Homo_sapiens__A0A024RA55
MECLYYFLGFLLLAARLPLDAAKRFHDVLGNERPSAYMREHNQLNGWSSDENDWNEKLYPVWKRGDMRWKNSWKGGRVQAVLTSDSPALVGSNITFAVNLIFPRCQKEDANGNIVYEKNCRNEAGLSADPYVYNWTAWSEDSDGENGTGQSHHNVFPDGKPFPHHPGWRRWNFIYVFHTLGQYFQKLGRCSVRVSVNTANVTLGPQLMEVTVYRRHGRAYVPIAQVKDVYVVTDQIPVFVTMFQKNDRNSSDETFLKDLPIMFDVLIHDPSHFLNYSTINYKWSFGDNTGLFVSTNHTVNHTYVLNGTFSLNLTVKAAAPGPCPPPPPPPRPSKPTPSLGPAGDNPLELSRIPDENCQINRYGHFQATITIVEGILEVNIIQMTDVLMPVPWPESSLIDFVVTCQGSIPTEVCTIISDPTCEITQNTVCSPVDVDEMCLLTVRRTFNGSGTYCVNLTLGDDTSLALTSTLISVPDRDPASPLRMANSALISVGCLAIFVTVISLLVYKKHKEYNPIENSPGNVVRSKGLSVFLNRAKAVFFPGNQEKDPLLKNQEFKGVS

SEQ ID NO: 578 - protein, 572 aa, synthetic construct
  REGION 1..572: note = GPNMB/m__Homo_sapiens__Q14956
MECLYYFLGFLLLAARLPLDAAKRFHDVLGNERPSAYMREHNQLNGWSSDENDWNEKLYPVWKRGDMRWKNSWKGGRVQAVLTSDSPALVGSNITFAVNLIFPRCQKEDANGNIVYEKNCRNEAGLSADPYVYNWTAWSEDSDGENGTGQSHHNVFPDGKPFPHHPGWRRWNFIYVFHTLGQYFQKLGRCSVRVSVNTANVTLGPQLMEVTVYRRHGRAYVPIAQVKDVYVVTDQIPVFVTMFQKNDRNSSDETFLKDLPIMFDVLIHDPSHFLNYSTINYKWSFGDNTGLFVSTNHTVNHTYVLNGTFSLNLTVKAAAPGPCPPPPPPPRPSKPTPSLATTLKSYDSNTPGPAGDNPLELSRIPDENCQINRYGHFQATITIVEGILEVNIIQMTDVLMPVPWPESSLIDFVVTCQGSIPTEVCTIISDPTCEITQNTVCSPVDVDEMCLLTVRRTFNGSGTYCVNLTLGDDTSLALTSTLISVPDRDPASPLRMANSALISVGCLAIFVTVISLLVYKKHKEYNPIENSPGNVVRSKGLSVFLNRAKAVFFPGNQEKDPLLKNQEFKGVS

SEQ ID NO: 579 - protein, 206 aa, synthetic construct [sequence omitted]

SEQ ID NO: 580 - protein, 206 aa, synthetic construct
  REGION 1..206: note = GPNMB/m__Homo_sapiens__Q96F58
MECLYYFLGFLLLAARLPLDAAKRFHDVLGNERPSAYMREHNQLNGWSSDENDWNEKLYPVWKRGDMRWKNSWKGGRVQAVLTSDSPALVGSNITFAVNLIFPRCQKEDANGNIVYEKNCRNEAGLSADPYVYNWTAWSEDSDGENGTGQSHHNVFPDGKPFPHHPGWRRWNFIYVFHTLGWLLQTPKLLLYLSLKFQPSLFLLYN

SEQ ID NO: 581 - protein, 879 aa, synthetic construct
  REGION 1..879: note = GRM3__Homo_sapiens__Q14832
MKMLTRLQVLTLALFSKGFLLSLGDHNFLRREIKIEGDLVLGGLFPINEKGTGTEECGRINEDRGIQRLEAMLFAIDEINKDDYLLPGVKLGVHILDTCSRDTYALEQSLEFVRASLTKVDEAEYMCPDGSYAIQENIPLLIAGVIGGSYSSVSIQVANLLRLFQIPQISYASTSAKLSDKSRYDYFARTVPPDFYQAKAMAEILRFFNWTYVSTVASEGDYGETGIEAFEQEARLRNICIATAEKVGRSNIRKSYDSVIRELLQKPNARVVVLFMRSDDSRELIAAASRANASFTWVASDGWGAQESIIKGSEHVAYGAITLELASQPVRQFDRYFQSLNPYNNHRNPWFRDFWEQKFQCSLQNKRNHRRVCDKHLAIDSSNYEQESKIMFVVNAVYAMAHALHKMQRTLCPNTTKLCDAMKILDGKKLYKDYLLKINFTAPFNPNKDADSIVKFDTFGDGMGRYNVFNFQNVGGKYSYLKVGHWAETLSLDVNSIHWSRNSVPTSQCSDPCAPNEMKNMQPGDVCCWICIPCEPYEYLADEFTCMDCGSGQWPTADLTGCYDLPEDYIRWEDAWAIGPVTIACLGFMCTCMVVTVFIKHNNTPLVKASGRELCYILLFGVGLSYCMTFFFIAKPSPVICALRRLGLGSSFAICYSALLTKTNCIARIFDGVKNGAQRPKFISPSSQVFICLGLILVQIVMVSVWLILEAPGTRRYTLAEKRETVILKCNVKDSSMLISLTYDVILVILCTVYAFKTRKCPENFNEAKFIGFTMYTTCIIWLAFLPIFYVTSSDYRVQTTTMCISVSLSGFVVLGCLFAPKVHIILFQPQKNVVTHRLHLNRFSVSGTGTTYSQSSASTYVPTVCNGREVLDSTTSSL

SEQ ID NO: 582 - protein, 648 aa, synthetic construct
  REGION 1..648: note = HAGE__Homo_sapiens__Q9NXZ2
MSHHGGAPKASTWVVASRRSSTVSRAPERRPAEELNRTGPEGYSVGRGGRWRGTSRPPEAVAAGHEELPLCFALKSHFVGAVIGRGGSKIKNIQSTTNTTIQIIQEQPESLVKIFGSKAMQTKAKAVIDNFVKKLEENYNSECGIDTAFQPSVGKDGSTDNNVVAGDRPLIDWDQIREEGLKWQKTKWADLPPIKKNFYKESTATSAMSKVEADSWRKENFNITWDDLKDGEKRPIPNPTCTFDDAFQCYPEVMENIKKAGFQKPTPIQSQAWPIVLQGIDLIGVAQTGTGKTLCYLMPGFIHLVLQPSLKGQRNRPGMLVLTPTRELALQVEGECCKYSYKGLRSVCVYGGGNRDEQIEELKKGVDIIIATPGRLNDLQMSNFVNLKNITYLVLDEADKMLDMGFEPQIMKILLDVRPDRQTVMTSATWPHSVHRLAQSYLKEPMIVYVGTLDLVAVSSVKQNIIVTTEEEKWSHMQTFLQSMSSTDKVIVFVSRKAVADHLSSDLILGNISVESLHGDREQRDREKALENFKTGKVRILIATDLASRGLDVHDVTHVYNFDFPRNIEEYVHRIGRTGRAGRTGVSITTLTRNDWRVASELINILERANQSIPEELVSMAERFKAHQQKREMERKMERPQGRPKKFH

SEQ ID NO: 583 - protein, 402 aa, synthetic construct
  REGION 1..402: note = hepsin__Homo_sapiens__B2ZDQ2
MAQKEGGRTVPCCSRPKVAALTAGTLLLLTAIGAASWAIVAVLLRSDQEPLYPVQVSSADARLMVFDKTEGTWRLLCSSRSNARVAGLSCEEMGFLRALTHSELDVRTAGANGTSGFFCVDEGRLPHTQRLLEVISVCDCPRGRFLAAICQDCGRRKLPVDRIVGGRDTSLGRWPWQVSLRYDGAHLCGGSLLSGDWVLTAAHCFPERNRVLSRWRVFAGAVAQASPHGLQLGVQAVVYHGGYLPFRDPNSEENSNDIALVHLSSPLPLTEYIQPVCLPAAGQALVDGKICTVTGWGNTQYYGQQAGVLQEARVPIISNDVCNGADFYGNQIKPKMFCAGYPEGGIDACQGDSGGPFVCEDSISRTPRWRLCGIVSWGTGCALAQKPGVYTKVSDFREWIFQ

SEQ ID NO: 584 - protein, 417 aa, synthetic construct
  REGION 1..417: note = hepsin__Homo_sapiens__P05981
MAQKEGGRTVPCCSRPKVAALTAGTLLLLTAIGAASWAIVAVLLRSDQEPLYPVQVSSADARLMVFDKTEGTWRLLCSSRSNARVAGLSCEEMGFLRALTHSELDVRTAGANGTSGFFCVDEGRLPHTQRLLEVISVCDCPRGRFLAAICQDCGRRKLPVDRIVGGRDTSLGRWPWQVSLRYDGAHLCGGSLLSGDWVLTAAHCFPERNRVLSRWRVFAGAVAQASPHGLQLGVQAVVYHGGYLPFRDPNSEENSNDIALVHLSSPLPLTEYIQPVCLPAAGQALVDGKICTVTGWGNTQYYGQQAGVLQEARVPIISNDVCNGADFYGNQIKPKMFCAGYPEGGIDACQGDSGGPFVCEDSISRTPRWRLCGIVSWGTGCALAQKPGVYTKVSDFREWIFQAIKTHSEASGMVTQL

SEQ ID NO: 585 - protein, 979 aa, synthetic construct
  REGION 1..979: note = Her2/neu__Homo_sapiens__B4DTR1
MELAALCRWGLLLALLPPGAASTQDNYLSTDVGSCTLVCPLHNQEVTAEDGTQRCEKCSKPCARVCYGLGMEHLREVRAVTSANIQEFAGCKKIFGSLAFLPESFDGDPASNTAPLQPEQLQVFETLEEITGYLYISAWPDSLPDLSVFQNLQVIRGRILHNGAYSLTLQGLGISWLGLRSLRELGSGLALIHHNTHLCFVHTVPWDQLFRNPHQALLHTANRPEDECVGEGLACHQLCARGHCWGPGPTQCVNCSQFLRGQECVEECRVLQGLPREYVNARHCLPCHPECQPQNGSVTCFGPEADQCVACAHYKDPPFCVARCPSGVKPDLSYMPIWKFPDEEGACQPCPINCTHSCVDLDDKGCPAEQRASPLTSIISAVVGILLVVVLGVVFGILIKRRQQKIRKYTMRRLLQETELVEPLTPSGAMPNQAQMRILKETELRKVKVLGSGAFGTVYKGIWIPDGENVKIPVAIKVLRENTSPKANKEILDEAYVMAGVGSPYVSRLLGICLTSTVQLVTQLMPYGCLLDHVRENRGRLGSQDLLNWCMQIAKGMSYLEDVRLVHRDLAARNVLVKSPNHVKITDFGLARLLDIDETEYHADGGKVPIKWMALESILRRRFTHQSDVWSYGVTVWELMTFGAKPYDGIPAREIPDLLEKGERLPQPPICTIDVYMIMVKCWMIDSECRPRFRELVSEFSRMARDPQRFVVIQNEDLGPASPLDSTFYRSLLEDDDMGDLVDAEEYLVPQQGFFCPDPAPGAGGMVHHRHRSSSTRSGGGDLTLGLEPSEEEAPRSPLAPSEGAGSDVFDGDLGMGAAKGLQSLPTHDPSPLQRYSEDPTVPLPSETDGYVAPLTCSPQPEYVNQPDVRPQPPSPREGPLPAARPAGATLERPKTLSPGKNGVVKDVFAFGGAVENPEYLTPQGGAAPQPHPPPAFSPAFDNLYYWDQDPPERGAPPSTFKGTPTAENPEYLGLDVPV

SEQ ID NO: 586 - protein, 87 aa, synthetic construct
  REGION 1..87: note = Her2/neu__Homo_sapiens__L8E8G2
MMRMKTFVMIHFHLMNGGKAKLYSRPHAKLLPEQRVTDKTGAPVEWPGQTQCSTETQTLAAMPAQAVMRVTCTVVDMHKSECAPAQT

SEQ ID NO: 587 - protein, 1255 aa, synthetic construct [sequence omitted]

SEQ ID NO: 588 - protein, 419 aa, synthetic construct
  REGION 1..419: note = Her2/neu__Homo_sapiens__Q9UK79
MELAALCRWGLLLALLPPGAASTQVCTGTDMKLRLPASPETHLDMLRHLYQGCQVVQGNLELTYLPTNASLSFLQDIQEVQGYVLIAHNQVRQVPLQRLRIVRGTQLFEDNYALAVLDNGDPLNNTTPVTGASPGGLRELQLRSLTEILKGGVLIQRNPQLCYQDTILWKDIFHKNNQLALTLIDTNRSRACHPCSPMCKGSRCWGESSEDCQSLTRTVCAGGCARCKGPLPTDCCHEQCAAGCTGPKHSDCLACLHFNHSGICELHCPALVTYNTDTFESMPNPEGRYTFGASCVTACPYNYLSTDVGSCTLVCPLHNQEVTAEDGTQRCEKCSKPCARGTHSLPPRPAAVPVPLRMQPGPAHPVLSFLRPSWDLVSAFYSLPLAPLSPTSVPISPVSVGRGPDPDAHVAVDLSRYEG

SEQ ID NO: 589 - protein, 182 aa, synthetic construct
  REGION 1..182: note = HLA-A2/m__Homo_sapiens__Q95387
GSHSMRYFFTSVSRPGRGEPRFIAVGYVDDTQFVRFDSDAASQRMEPRAPWIEQEGPEYWDGETRKVKAHSQTHRVDLGTLRGYYNQSEAGSHTVQRMYGCDVGSDWRFLRGYHQYAYDGKDYIALKEDLRSWTAADMAAQTTKHKWETAHVAEQLRAYLEGTCVEWLRRYLENGKETLQRT

SEQ ID NO: 590 - protein, 181 aa, synthetic construct
  REGION 1..181: note = HLA-A2/m__Homo_sapiens__Q9MYF8
SHSMRYFFTSVSRPGRGEPRFIAVGYVDDTQFVRFDSDAASQRMEPRAPWIEQEGPEYWDGETRKVKAHSQTHRVDLGTLRGYYNQSEAGSHTVQRMYGCDVGSDWRFLRGYHQYAYDGKDYIALKEDLRSWTAADMAAQTTKHKWEAAHVAEQLRAYLEGTCVEWLRRYLENGKETLQRT

SEQ ID NO: 591 - protein, 234 aa, synthetic construct
  REGION 1..234: note = homeobox_NKX3.1__Homo_sapiens__Q99801
MLRVPEPRPGEAKAEGAAPPTPSKPLTSFLIQDILRDGAQRQGGRTSSQRQRDPEPEPEPEPEGGRSRAGAQNDQLSTGPRAAPEEAETLAETEPERHLGSYLLDSENTSGALPRLPQTPKQPQKRSRAAFSHTQVIELERKFSHQKYLSAPERAHLAKNLKLTETQVKIWFQNRRYKTKRKQLSSELGDLEKHSSLPALKEEAFSRASLVSVYNSYPYYPYLYCVGSWSPAFW

SEQ ID NO: 592 - protein, 313 aa, synthetic construct
  REGION 1..313: note = HOM-TES-85__Homo_sapiens__B2RBQ6
MASFRKLTLSEKVPPNHPSRKKVNFLDMSLDDIIIYKELEGTNAEEEKNKRQNHSKKESPSRQQSKAHRHRHRRDYSRCRSNSEEGNHDKKPSQKPSGFKSGQHPLNGQPLIEQEKCSDNYEAQAEKNQGQSEGNQHQSEGNPDKSEESQGQPEENHHSERSRNHLERSLSQSDRSQGQLKRHHPQYERSHGQYKRSHGQSERSHGHSERSHGHSERSHGHSERSHGHSKRSRSQGDLVDTQSDLIATQRDLIATQKDLIATQRDLIATQRDLIVTQRDLVATERDLINQSGRSHGQSERHQRYSTGKNTITT

SEQ ID NO: 593 - protein, 313 aa, synthetic construct
  REGION 1..313: note = HOM-TES-85__Homo_sapiens__Q9P127
MASFRKLTLSEKVPPNHPSRKKVNFLDMSLDDIIIYKELEGTNAEEEKNKRQNHSKKESPSRQQSKAHRHRHRRGYSRCRSNSEEGNHDKKPSQKPSGFKSGQHPLNGQPLIEQEKCSDNYEAQAEKNQGQSEGNQHQSEGNPDKSEESQGQPEENHHSERSRNHLERSLSQSDRSQGQLKRHHPQYERSHGQYKRSHGQSERSHGHSERSHGHSERSHGHSERSHGHSKRSRSQGDLVDTQSDLIATQRDLIATQKDLIATQRDLIATQRDLIVTQRDLVATERDLINQSGRSHGQSERHQRYSTGKNTITT

SEQ ID NO: 594 - protein, 127 aa, synthetic construct
  REGION 1..127: note = HPG1__Homo_sapiens__12543784
MIKKNLKKLGIEETYLNIIKAIYDRPTASIQKTENLSTKTGTSQEYHLSPLWFYIVLEILASTIRQEKNLKDIHTEKEEVKLSLFADAMILYLKKPNDSTRKLLELIKKIHSSCRIKINIHFAFCSQ

SEQ ID NO: 595 - protein, 641 aa, synthetic construct
  REGION 1..641: note = HS71A__Homo_sapiens__P0DMV8
MAKAAAIGIDLGTTYSCVGVFQHGKVEIIANDQGNRTTPSYVAFTDTERLIGDAAKNQVALNPQNTVFDAKRLIGRKFGDPVVQSDMKHWPFQVINDGDKPKVQVSYKGETKAFYPEEISSMVLTKMKEIAEAYLGYPVTNAVITVPAYFNDSQRQATKDAGVIAGLNVLRIINEPTAAAIAYGLDRTGKGERNVLIFDLGGGTFDVSILTIDDGIFEVKATAGDTHLGGEDFDNRLVNHFVEEFKRKHKKDISQNKRAVRRLRTACERAKRTLSSSTQASLEIDSLFEGIDFYTSITRARFEELCSDLFRSTLEPVEKALRDAKLDKAQIHDLVLVGGSTRIPKVQKLLQDFFNGRDLNKSINPDEAVAYGAAVQAAILMGDKSENVQDLLLLDVAPLSLGLETAGGVMTALIKRNSTIPTKQTQIFTTYSDNQPGVLIQVYEGERAMTKDNNLLGRFELSGIPPAPRGVPQIEVTFDIDANGILNVTATDKSTGKANKITITNDKGRLSKEEIERMVQEAEKYKAEDEVQRERVSAKNALESYAFNMKSAVEDEGLKGKISEADKKKVLDKCQEVISWLDANTLAEKDEFEHKRKELEQVCNPIISGLYQGAGGPGPGGFGAQGPKGGSGSGPTIEEVD

SEQ ID NO: 596 - protein, 641 aa, synthetic construct; identical to SEQ ID NO: 595
  REGION 1..641: note = HS71B__Homo_sapiens__P0DMV9

SEQ ID NO: 597 - protein, 208 aa, synthetic construct
  REGION 1..208: note = HST-2__Homo_sapiens__P10767
MALGQKLFITMSRGAGRLQGTLWALVFLGILVGMVVPSPAGTRANNTLLDSRGWGTLLSRSRAGLAGEIAGVNWESGYLVGIKRQRRLYCNVGIGFHLQVLPDGRISGTHEENPYSLLEISTVERGVVSLFGVRSALFVAMNSKGRLYATPSFQEECKFRETLLPNNYNAYESDLYQGTYIALSKYGRVKRGSKVSPIMTVTHFLPRI

SEQ ID NO: 598 - protein, 523 aa, synthetic construct
  REGION 1..523: note = hTERT__Homo_sapiens__O94807
MPRAPRCRAVRSLLRSHYREVLPLATFVRRLGPQGWRLVQRGDPAAFRALVAQCLVCVPWDARPPPAAPSFRQVSCLKELVARVLQRLCERGAKNVLAFGFALLDGARGGPPEAFTTSVRSYLPNTVTDALRGSGAWGLLLRRVGDDVLVHLLARCALFVLVAPSCAYQVCGPPLYQLGAATQARPPPHASGPRRRLGCERAWNHSVREAGVPLGLPAPGARRRGGSASRSLPLPKRPRRGAAPEPERTPVGQGSWAHPGRTRGPSDRGFCVVSPARPAEEATSLEGALSGTRHSHPSVGRQHHAGPPSTSRPPRPWDTPCPPVYAETKHFLYSSGDKEQLRPSFLLSSLRPILTGARRLVETIFLGSSPGCQGLPAGCPACPSATGKCGPCFWSCLGTTRSAPTGCSSRRTARCELRSPQQPVSVPGRSPRALWRPPRRRTQTPVAWCSCSASTAPLAGVRLRAGLPAPAGAPRPLGLQAQRRRFLRNTKKFISLGKHAKLSLQELTWKMSVRDCAWLRRSP

SEQ ID NO: 599 - protein, 559 aa, synthetic construct
  REGION 1..559: note = iCE__Homo_sapiens__O00748
MRLHRLRARLSAVACGLLLLLVRGQGQDSASPIRTTHTGQVLGSLVHVKGANAGVQTFLGIPFAKPPLGPLRFAPPEPPESWSGVRDGTTHPAMCLQDLTAVESEFLSQFNMTFPSDSMSEDCLYLSIYTPAHSHEGSNLPVMVWIHGGALVFGMASLYDGSMLAALENVVVVIIQYRLGVLGFFSTGDKHATGNWGYLDQVAALRWVQQNIAHFGGNPDRVTIFGESAGGTSVSSLVVSPISQGLFHGAIMESGVALLPGLIASSADVISTVVANLSACDQVDSEALVGCLRGKSKEEILAINKPFKMIPGVVDGVFLPRHPQELLASADFQPVPSIVGVNNNEFGWLIPKVMRIYDTQKEMDREASQAALQKMLTLLMLPPTFGDLLREEYIGDNGDPQTLQAQFQEMMADSMFVIPALQVAHFQCSRAPVYFYEFQHQPSWLKNIRPPHMKADHGDELPFVFRSFFGGNYIKFTEEEEQLSRKMMKYWANFARNGNPNGEGLPHWPLFDQEEQYLQLNLQPAVGRALKAHRLQFWKKALPQKIQELEEPEERHTEL

SEQ ID NO: 600 - protein, 579 aa, synthetic construct
  REGION 1..579: note = IF2B3__Homo_sapiens__O00425
MNKLYIGNLSENAAPSDLESIFKDAKIPVSGPFLVKTGYAFVDCPDESWALKAIEALSGKIELHGKPIEVEHSVPKRQRIRKLQIRNIPPHLQWEVLDSLLVQYGVVESCEQVNTDSETAVVNVTYSSKDQARQALDKLNGFQLENFTLKVAYIPDEMAAQQNPLQQPRGRRGLGQRGSSRQGSPGSVSKQKPCDLPLRLLVPTQFVGAIIGKEGATIRNITKQTQSKIDVHRKENAGAAEKSITILSTPEGTSAACKSILEIMHKEAQDIKFTEEIPLKILAHNNFVGRLIGKEGRNLKKIEQDTDTKITISPLQELTLYNPERTITVKGNVETCAKAEEEIMKKIRESYENDIASMNLQAHLIPGLNLNALGLFPPTSGMPPPTSGPPSAMTPPYPQFEQSETETVHLFIPALSVGAIIGKQGQHIKQLSRFAGASIKIAPAEAPDAKVRMVIITGPPEAQFKAQGRIYGKIKEENFVSPKEEVKLEAHIRVPSFAAGRVIGKGGKTVNELQNLSSAEVVVPRDQTPDENDQVVVKITGHFYACQVAQRKIQEILTQVKQHQQQKALQSGPPQSRRK

SEQ ID NO: 601 - protein, 380 aa, synthetic construct
  REGION 1..380: note = IL-13Ra2__Homo_sapiens__Q14627
MAFVCLAIGCLYTFLISTTFGCTSSSDTEIKVNPPQDFEIVDPGYLGYLYLQWQPPLSLDHFKECTVEYELKYRNIGSETWKTIITKNLHYKDGFDLNKGIEAKIHTLLPWQCTNGSEVQSSWAETTYWISPQGIPETKVQDMDCVYYNWQYLLCSWKPGIGVLLDTNYNLFYWYEGLDHALQCVDYIKADGQNIGCRFPYLEASDYKDFYICVNGSSENKPIRSSYFTFQLQNIVKPLPPVYLTFTRESSCEIKLKWSIPLGPIPARCFDYEIEIREDDTTLVTATVENETYTLKTTNETRQLCFVVRSKVNIYCSDDGIWSEWSDKQCWEGEDLSKKTLLRFWLPFGFILILVIFVTGLLLRKPNTYPKMIPEFFCDT

SEQ ID NO: 602 - protein, 272 aa, synthetic construct
  REGION 1..272: note = IL2-RA__Homo_sapiens__P01589
MDSYLLMWGLLTFIMVPGCQAELCDDDPPEIPHATFKAMAYKEGTMLNCECKRGFRRIKSGSLYMLCTGNSSHSSWDNQCQCTSSATRNTTKQVTPQPEEQKERKTTEMQSPMQPVDQASLPGHCREPPPWENEATERIYHFVVGQMVYYQCVQGYRALHRGPAESVCKMTHGKTRWTQPQLICTGEMETSQFPGEEKPQASPEGRPESETSCLVTTTDFQIQTEMAATMETSIFTTEYQVAVAGCVFLLISVLLLSGLTWQRRQRKSRRTI

SEQ ID NO: 603 - protein, 551 aa, synthetic construct
  REGION 1..551: note = IL2-RB__Homo_sapiens__P14784
MAAPALSWRLPLLILLLPLATSWASAAVNGTSQFTCFYNSRANISCVWSQDGALQDTSCQVHAWPDRRRWNQTCELLPVSQASWACNLILGAPDSQKLTTVDIVTLRVLCREGVRWRVMAIQDFKPFENLRLMAPISLQVVHVETHRCNISWEISQASHYFERHLEFEARTLSPGHTWEEAPLLTLKQKQEWICLETLTPDTQYEFQVRVKPLQGEFTTWSPWSQPLAFRTKPAALGKDTIPWLGHLLVGLSGAFGFIILVYLLINCRNTGPWLKKVLKCNTPDPSKFFSQLSSEHGGDVQKWLSSPFPSSSFSPGGLAPEISPLEVLERDKVTQLLLQQDKVPEPASLSSNHSLTSCFTNQGYFFFHLPDALEIEACQVYFTYDPYSEEDPDEGVAGAPTGSSPQPLQPLSGEDDAYCTFPSRDDLLLFSPSLLGGPSPPSTAPGGSGAGEERMPPSLQERVPRDWDPQPLGPPTPGVPDLVDFQPPPELVLREAGEEVPDAGPREGVSFPWSRPPGQGEFRALNARLPLNTDAYLSLQELQGQDPTHLV

SEQ ID NO: 604 - protein, 369 aa, synthetic construct
  REGION 1..369: note = IL2-RG__Homo_sapiens__P31785
MLKPSLPFTSLLFLQLPLLGVGLNTTILTPNGNEDTTADFFLTTMPTDSLSVSTLPLPEVQCFVFNVEYMNCTWNSSSEPQPTNLTLHYWYKNSDNDKVQKCSHYLFSEEITSGCQLQKKEIHLYQTFVVQLQDPREPRRQATQMLKLQNLVIPWAPENLTLHKLSESQLELNWNNRFLNHCLEHLVQYRTDWDHSWTEQSVDYRHKFSLPSVDGQKRYTFRVRSRFNPLCGSAQHWSEWSHPIHWGSNTSKENPFLFALEAVVISVGSMGLIISLLCVYFWLERTMPRIPTLKNLEDLVTEYHGNFSAWSGVSKGLAESLQPDYSERLCLVSEIPPKGGALGEGPGASPCNQHSPYWAPPCYTLKPET

SEQ ID NO: 605 - protein, 184 aa, synthetic construct
  REGION 1..184: note = IMP3__Homo_sapiens__Q9NV31
MVRKLKFHEQKLLKQVDFLNWEVTDHNLHELRVLRRYRLQRREDYTRYNQLSRAVRELARRLRDLPERDQFRVRASAALLDKLYALGLVPTRGSLELCDFVTASSFCRRRLPTVLLKLRMAQHLQAAVAFVEQGHVRVGPDVVTDPAFLVTRSMEDFVTWVDSSKIKRHVLEYNEERDDFDLEA

SEQ ID NO: 606 - protein, 1049 aa, synthetic construct
  REGION 1..1049: note = ITA5__Homo_sapiens__P08648
MGSRTPESPLHAVQLRWGPRRRPPLLPLLLLLLPPPPRVGGFNLDAEAPAVLSGPPGSFFGFSVEFYRPGTDGVSVLVGAPKANTSQPGVLQGGAVYLCPWGASPTQCTPIEFDSKGSRLLESSLSSSEGEEPVEYKSLQWFGATVRAHGSSILACAPLYSWRTEKEPLSDPVGTCYLSTDNFTRILEYAPCRSDFSWAAGQGYCQGGFSAEFTKTGRVVLGGPGSYFWQGQILSATQEQIAESYYPEYLINLVQGQLQTRQASSIYDDSYLGYSVAVGEFSGDDTEDFVAGVPKGNLTYGYVTILNGSDIRSLYNFSGEQMASYFGYAVAATDVNGDGLDDLLVGAPLLMDRTPDGRPQEVGRVYVYLQHPAGIEPTPTLTLTGHDEFGRFGSSLTPLGDLDQDGYNDVAIGAPFGGETQQGVVFVFPGGPGGLGSKPSQVLQPLWAASHTPDFFGSALRGGRDLDGNGYPDLIVGSFGVDKAVVYRGRPIVSASASLTIFPAMFNPEERSCSLEGNPVACINLSFCLNASGKHVADSIGFTVELQLDWQKQKGGVRRALFLASRQATLTQTLLIQNGAREDCREMKIYLRNESEFRDKLSPIHIALNFSLDPQAPVDSHGLRPALHYQSKSRIEDKAQILLDCGEDNICVPDLQLEVFGEQNHVYLGDKNALNLTFHAQNVGEGGAYEAELRVTAPPEAEYSGLVRHPGNFSSLSCDYFAVNQSRLLVCDLGNPMKAGASLWGGLRFTVPHLRDTKKTIQFDFQILSKNLNNSQSDVVSFRLSVEAQAQVTLNGVSKPEAVLFPVSDWHPRDQPQKEEDLGPAVHHVYELINQGPSSISQGVLELSCPQALEGQQLLYVTRVTGLNCTTNHPINPKGLELDPEGSLHHQQKREAPSRSSASSGPQILKCPEAECFRLRCELGPLHQQESQSLQLHFRVWAKTFLQREHQPFSLQCEAVYKALKMPYRILPRQLPQKERQVATAVQWTKAEGSYGVPLWIIILAILFGLLLLGLLIYILYKLGFFKRSLPYGTAMEKAQLKPPATSDA

SEQ ID NO: 607 - protein, 798 aa, synthetic construct
  REGION 1..798: note = ITB1__Homo_sapiens__P05556
MNLQPIFWIGLISSVCCVFAQTDENRCLKANAKSCGECIQAGPNCGWCTNSTFLQEGMPTSARCDDLEALKKKGCPPDDIENPRGSKDIKKNKNVTNRSKGTAEKLKPEDITQIQPQQLVLRLRSGEPQTFTLKFKRAEDYPIDLYYLMDLSYSMKDDLENVKSLGTDLMNEMRRITSDFRIGFGSFVEKTVMPYISTTPAKLRNPCTSEQNCTSPFSYKNVLSLTNKGEVFNELVGKQRISGNLDSPEGGFDAIMQVAVCGSLIGWRNVTRLLVFSTDAGFHFAGDGKLGGIVLPNDGQCHLENNMYTMSHYYDYPSIAHLVQKLSENNIQTIFAVTEEFQPVYKELKNLIPKSAVGTLSANSSNVIQLIIDAYNSLSSEVILENGKLSEGVTISYKSYCKNGVNGTGENGRKCSNISIGDEVQFEISITSNKCPKKDSDSFKIRPLGFTEEVEVILQYICECECQSEGIPESPKCHEGNGTFECGACRCNEGRVGRHCECSTDEVNSEDMDAYCRKENSSEICSNNGECVCGQCVCRKRDNTNEIYSGKFCECDNFNCDRSNGLICGGNGVCKCRVCECNPNYTGSACDCSLDTSTCEASNGQICNGRGICECGVCKCTDPKFQGQTCEMCQTCLGVCAEHKECVQCRAFNKGEKKDTCTQECSYFNITKVESRDKLPQPVQPDPVSHCKEKDVDDCWFYFTYSVNGNNEVMVHVVENPECPTGPDIIPIVAGVVAGIVLIGLALLLIWKLLMIIHDRREFAKFEKEKMNAKWDTGENPIYKSAVTTVVNPKYEGK

SEQ ID NO: 608 - protein, 788 aa, synthetic construct
  REGION 1..788: note = ITB6__Homo_sapiens__P18564
MGIELLCLFFLFLGRNDHVQGGCALGGAETCEDCLLIGPQCAWCAQENFTHPSGVGERCDTPANLLAKGCQLNFIENPVSQVEILKNKPLSVGRQKNSSDIVQIAPQSLILKLRPGGAQTLQVHVRQTEDYPVDLYYLMDLSASMDDDLNTIKELGSRLSKEMSKLTSNFRLGFGSFVEKPVSPFVKTTPEEIANPCSSIPYFCLPTFGFKHILPLTNDAERFNEIVKNQKISANIDTPEGGFDAIMQAAVCKEKIGWRNDSLHLLVFVSDADSHFGMDSKLAGIVIPNDGLCHLDSKNEYSMSTVLEYPTIGQLIDKLVQNNVLLIFAVTQEQVHLYENYAKLIPGATVGLLQKDSGNILQLIISAYEELRSEVELEVLGDTEGLNLSFTAICNNGTLFQHQKKCSHMKVGDTASFSVTVNIPHCERRSRHIIIKPVGLGDALELLVSPECNCDCQKEVEVNSSKCHHGNGSFQCGVCACHPGHMGPRCECGEDMLSTDSCKEAPDHPSCSGRGDCYCGQCICHLSPYGNIYGPYCQCDNFSCVRHKGLLCGGNGDCDCGECVCRSGWTGEYCNCTTSTDSCVSEDGVLCSGRGDCVCGKCVCTNPGASGPTCERCPTCGDPCNSKRSCIECHLSAAGQAREECVDKCKLAGATISEEEDFSKDGSVSCSLQGENECLITFLITTDNEGKTIIHSINEKDCPKPPNIPMIMLGVSLAILLIGVVLLCIWKLLVSFHDRKEVAKFEAERSKAKWQTGTNPLYRGSTSTFKNVTYKHREKQKVDLSTDC

SEQ ID NO: 609 - protein, 261 aa, synthetic construct
  REGION 1..261: note = kallikrein-2__Homo_sapiens__A0A024R4J4
MWDLVLSIALSVGCTGAVPLIQSRIVGGWECEKHSQPWQVAVYSHGWAHCGGVLVHPQWVLTAAHCLKKNSQVWLGRHNLFEPEDTGQRVPVSHSFPHPLYNMSLLKHQSLRPDEDSSHDLMLLRLSEPAKITDVVKVLGLPTQEPALGTTCYASGWGSIEPEEFLRPRSLQCVSLHLLSNDMCARAYSEKVTEFMLCAGLWTGGKDTCGGDSGGPLVCNGVLQGITSWGPEPCALPEKPAVYTKVVHYRKWIKDTIAANP

SEQ ID NO: 610 - protein, 223 aa, synthetic construct
  REGION 1..223: note = kallikrein-2__Homo_sapiens__A0A024R4N3
MWDLVLSIALSVGCTGAVPLIQSRIVGGWECEKHSQPWQVAVYSHGWAHCGGVLVHPQWVLTAAHCLKKNSQVWLGRHNLFEPEDTGQRVPVSHSFPHPLYNMSLLKHQSLRPDEDSSHDLMLLRLSEPAKITDVVKVLGLPTQEPALGTTCYASGWGSIEPEEFLRPRSLQCVSLHLLSNDMCARAYSEKVTEFMLCAGLWTGGKDTCGVSHPYSQHLEGKG

SEQ ID NO: 611 - protein, 62 aa, synthetic construct
  REGION 1..62: note = kallikrein-2__Homo_sapiens__B0AZU9
MSLLKHQSLRPDEDSSHDLMLLRLSEPAKITDVVKVLGLPTQEPALGTTCYASGWGSIEPEE

SEQ ID NO: 612 - protein, 244 aa, synthetic construct [sequence omitted]

SEQ ID NO: 613 - protein, 261 aa, synthetic construct; identical to SEQ ID NO: 609
  REGION 1..261: note = kallikrein-2__Homo_sapiens__P20151

SEQ ID NO: 614 - protein, 49 aa, synthetic construct
  REGION 1..49: note = kallikrein-2__Homo_sapiens__Q6T774
MWDLVLSIALSVGCTGIARSGWVGTTCLSLKTQARGSLSATASHTRSTI

SEQ ID NO: 615 - protein, 180 aa, synthetic construct
  REGION 1..180: note = kallikrein-2__Homo_sapiens__Q6T775
MWDLVLSIALSVGCTGAVPLIQSRIVGGWECEKHSQPWQVAVYSHGWAHCGGVLVHPQWVLTAAHCLKKNSQVWLGRHNLFEPEDTGQRVPVSHSFPHPLYNMSLLKHQSLRPDEDSSHDLMLLRLSEPAKITDVVKVLGLPTQEPALGTTCYASGWGSIEPEECTPGPDGVAGSPDAWV

SEQ ID NO: 616 - protein, 254 aa, synthetic construct
  REGION 1..254: note = kallikrein-4__Homo_sapiens__A0A0C4DFQ5
MATAGNPWGWFLGYLILGVAGSLVSGSCSQIINGEDCSPHSQPWQAALVMENELFCSGVLVHPQWVLSAAHCFQNSYTIGLGLHSLEADQEPGSQMVEASLSVRHPEYNRPLLANDLMLIKLDESVSESDTIRSISIASQCPTAGNSCLVSGWGLLANGRMPTVLQCVNVSVVSEEVCSKLYDPLYHPSMFCAGGGQDQKDSCNGDSGGPLICNGYLQGLVSFGKAPCGQVGVPGVYTNLCKFTEWIEKTVQAS

SEQ ID NO: 617 - protein, 75 aa, synthetic construct
  REGION 1..75: note = kallikrein-4__Homo_sapiens__Q5BQA0
MATAGNPWGWFLGYLILGVAGSLVSGSCSQIINGEDCSPHSQPWQAALVMENELFCSGVLVHPQWVLSAAHCFQK

SEQ ID NO: 618 - protein, 195 aa, synthetic construct
  REGION 1..195: note = kallikrein-4__Homo_sapiens__Q96PT0
MATAGNPWGWFLGYLILGVAGSLVSGSCSQIINGEDCSPHSQPWQAALVMENELFCSGVLVHPQWVLSAAHCFQNSYTIGLGLHSLEADQEPGSQMVEASLSVRHPEYNRPLLANDLMLIKLDESVSESDTIRSISIASQCPTAGNSCLVSGWGLLANGELTGVCLPSSRRSSAQSRGLTQSSASQAECLPCCSA

SEQ ID NO: 619 - protein, 159 aa, synthetic construct
  REGION 1..159: note = kallikrein-4__Homo_sapiens__Q96PT1
MATAGNPWGWFLGYLILGVAGSLVSGSCSQIINGEDCSPHSQPWQAALVMENELFCSGVLVHPQWVLSAAHCFQNSYTIGLGLHSLEADQEPGSQMVEASLSVRHPEYNRPLLANDLMLIKLDESVSESDTIRSISIASQCPTAGNSCLVSGWGLLANG

SEQ ID NO: 620 - protein, 254 aa, synthetic construct
  REGION 1..254: note = kallikrein-4__Homo_sapiens__Q9Y5K2
MATAGNPWGWFLGYLILGVAGSLVSGSCSQIINGEDCSPHSQPWQAALVMENELFCSGVLVHPQWVLSAAHCFQNSYTIGLGLHSLEADQEPGSQMVEASLSVRHPEYNRPLLANDLMLIKLDESVSESDTIRSISIASQCPTAGNSCLVSGWGLLANGRMPTVLQCVNVSVVSEEVCSKLYDPLYHPSMFCAGGGHDQKDSCNGDSGGPLICNGYLQGLVSFGKAPCGQVGVPGVYTNLCKFTEWIEKTVQAS

SEQ ID NO: 621 - protein, 890 aa, synthetic construct
  REGION 1..890: note = KI20A__Homo_sapiens__O95235
MSQGILSPPAGLLSDDDVVVSPMFESTAADLGSVVRKNLLSDCSVVSTSLEDKQQVPSEDSMEKVKVYLRVRPLLPSELERQEDQGCVRIENVETLVLQAPKDSFALKSNERGIGQATHRFTFSQIFGPEVGQASFFNLTVKEMVKDVLKGQNWLIYTYGVTNSGKTHTIQGTIKDGGILPRSLALIFNSLQGQLHPTPDLKPLLSNEVIWLDSKQIRQEEMKKLSLLNGGLQEEELSTSLKRSVYIESRIGTSTSFDSGIAGLSSISQCTSSSQLDETSHRWAQPDTAPLPVPANIRFSIWISFFEIYNELLYDLLEPPSQQRKRQTLRLCEDQNGNPYVKDLNWIHVQDAEEAWKLLKVGRKNQSFASTHLNQNSSRSHSIFSIRILHLQGEGDIVPKISELSLCDLAGSERCKDQKSGERLKEAGNINTSLHTLGRCIAALRQNQQNRSKQNLVPFRDSKLTRVFQGFFTGRGRSCMIVNVNPCASTYDETLHVAKFSAIASQLVHAPPMQLGFPSLHSFIKEHSLQVSPSLEKGAKADTGLDDDIENEADISMYGKEELLQVVEAMKTLLLKERQEKLQLEMHLRDEICNEMVEQMQQREQWCSEHLDTQKELLEEMYEEKLNILKESLTSFYQEEIQERDEKIEELEALLQEARQQSVAHQQSGSELALRRSQRLAASASTQQLQEVKAKLQQCKAELNSTTEELHKYQKMLEPPPSAKPFTIDVDKKLEEGQKNIRLLRTELQKLGESLQSAERACCHSTGAGKLRQALTTCDDILIKQDQTLAELQNNMVLVKLDLRKKAACIAEQYHTVLKLQGQVSAKKRLGTNQENQQPNQQPPGKKPFLRNLLPRTPTCQSSTDCSPYARILRSRRSPLLKSGPFGKKY

SEQ ID NO: 622 - protein, 370 aa, synthetic construct
  REGION 1..370: note = KIAA0205__Homo_sapiens__Q92604
MAITLEEAPWLGWLLVKALMRFAFMVVNNLVAIPSYICYVIILQPLRVLDSKRFWYIEGIMYKWLLGMVASWGWYAGYTVMEWGEDIKAVSKDEAVMLVNHQATGDVCTLMMCLQDKGLVVAQMMWLMDHIFKYTNFGIVSLVHGDFFIRQGRSYRDQQLLLLKKHLENNYRSRDRKWIVLFPEGGFLRKRRETSQAFAKKNNLPFLTNVTLPRSGATKIILNALVAQQKNGSPAGGDAKELDSKSKGLQWIIDTTIAYPKAEPIDIQTWILGYRKPTVTHVHYRIFPIKDVPLETDDLTTWLYQRFVEKEDLLSHFYETGAFPPSKGHKEAVSREMTLSNLWIFLIQSFAFLSGYMWYNIIQYFYHCLF

SEQ ID NO: 623 - protein, 725 aa, synthetic construct
  REGION 1..725: note = KIF2C__Homo_sapiens__Q99661
MAMDSSLQARLFPGLAIKIQRSNGLIHSANVRTVNLEKSCVSVEWAEGGATKGKEIDFDDVAAINPELLQLLPLHPKDNLPLQENVTIQKQKRRSVNSKIPAPKESLRSRSTRMSTVSELRITAQENDMEVELPAAANSRKQFSVPPAPTRPSCPAVAEIPLRMVSEEMEEQVHSIRGSSSANPVNSVRRKSCLVKEVEKMKNKREEKKAQNSEMRMKRAQEYDSSFPNWEFARMIKEFRATLECHPLTMTDPIEEHRICVCVRKRPLNKQELAKKEIDVISIPSKCLLLVHEPKLKVDLTKYLENQAFCFDFAFDETASNEVVYRFTARPLVQTIFEGGKATCFAYGQTGSGKTHTMGGDLSGKAQNASKGIYAMASRDVFLLKNQPCYRKLGLEVYVTFFEIYNGKLFDLLNKKAKLRVLEDGKQQVQVVGLQEHLVNSADDVIKMIDMGSACRTSGQTFANSNSSRSHACFQIILRAKGRMHGKFSLVDLAGNERGADTSSADRQTRMEGAEINKSLLALKECIRALGQNKAHTPFRESKLTQVLRDSFIGENSRTCMIATISPGISSCEYTLNTLRYADRVKELSPHSGPSGEQLIQMETEEMEACSNGALIPGNLSKEEEELSSQMSSFNEAMTQIRELEEKAMEELKEIIQQGPDWLELSEMTEQPDYDLETFVNKAESALAQQAKHFSALRDVIKALRLAMQLEEQASRQISSKKRPQ

SEQ ID NO: 624 - protein, 113 aa, synthetic construct
  REGION 1..113: note = KK-LC-1__Homo_sapiens__Q5H943
MNFYLLLASSILCALIVFWKYRRFQRNTGEMSSNSTALALVRPSSSGLINSNTDNNLAVYDLSRDILNNFPHSIARQKRILVNLSMVENKLVELEHTLLSKGFRGASPHRKST

SEQ ID NO: 625 - protein, 860 aa, synthetic construct [sequence omitted]

SEQ ID NO: 626 - protein, 433 aa, synthetic construct
  REGION 1..433: note = LGMN__Homo_sapiens__Q99538
MVWKVAVFLSVALGIGAVPIDDPEDGGKHWVVIVAGSNGWYNYRHQADACHAYQIIHRNGIPDEQIVVMMYDDIAYSEDNPTPGIVINRPNGTDVYQGVPKDYTGEDVTPQNFLAVLRGDAEAVKGIGSGKVLKSGPQDHVFIYFTDHGSTGILVFPNEDLHVKDLNETIHYMYKHKMYRKMVFYIEACESGSMMNHLPDNINVYATTAANPRESSYACYYDEKRSTYLGDWYSVNWMEDSDVEDLTKETLHKQYHLVKSHTNTSHVMQYGNKTISTMKVMQFQGMKRKASSPVPLPPVTHLDLTPSPDVPLTIMKRKLMNTNDLEESRQLTEEIQRHLDARHLIEKSVRKIVSLLAASEAEVEQLLSERAPLTGHSCYPEALLHFRTHCFNWHSPTYEYALRHLYVLVNLCEKPYPLHRIKLSMDHVCLGHY

SEQ ID NO: 627 - protein, 598 aa, synthetic construct
  REGION 1..598: note = LIRB2__Homo_sapiens__Q8N423
MTPIVTVLICLGLSLGPRTHVQTGTIPKPTLWAEPDSVITQGSPVTLSCQGSLEAQEYRLYREKKSASWITRIRPELVKNGQFHIPSITWEHTGRYGCQYYSRARWSELSDPLVLVMTGAYPKPTLSAQPSPVVTSGGRVTLQCESQVAFGGFILCKEGEEEHPQCLNSQPHARGSSRAIFSVGPVSPNRRWSHRCYGYDLNSPYVWSSPSDLLELLVPGVSKKPSLSVQPGPVVAPGESLTLQCVSDVGYDRFVLYKEGERDLRQLPGRQPQAGLSQANFTLGPVSRSYGGQYRCYGAHNLSSECSAPSDPLDILITGQIRGTPFISVQPGPTVASGENVTLLCQSWRQFHTFLLTKAGAADAPLRLRSIHEYPKYQAEFPMSPVTSAHAGTYRCYGSLNSDPYLLSHPSEPLELVVSGPSMGSSPPPTGPISTPAGPEDQPLTPTGSDPQSGLGRHLGVVIGILVAVVLLLLLLLLLFLILRHRRQGKHWTSTQRKADFQHPAGAVGPEPTDRGLQWRSSPAADAQEENLYAAVKDTQPEDGVEMDTRAAASEAPQDVTYAQLHSLTLRRKATEPPPSQEREPPAEPSIYATLAIH

SEQ ID NO: 628 - protein, 165 aa, synthetic construct
  REGION 1..165: note = LY6K__Homo_sapiens__Q17RY6
MALLALLLVVALPRVWTDANLTARQRDPEDSQRTDEGDNRVWCHVCERENTFECQNPRRCKWTEPYCVIAAVKIFPRFFMVAKQCSAGCAAMERPKPEEKRFLLEEPMPFFYLKCCKIRYCNLEGPPINSSVFKEYAGSMGESCGGLWLAILLLLASIAAGLSLS

SEQ ID NO: 629 - protein, 124 aa, synthetic construct
  REGION 1..124: note = MAGA5__Homo_sapiens__P43359
MSLEQKSQHCKPEEGLDTQEEALGLVGVQAATTEEQEAVSSSSPLVPGTLGEVPAAGSPGPLKSPQGASAIPTAIDFTLWRQSIKGSSNQEEEGPSTSPDPESVFRAALSKKVADLIHFLLLKY

SEQ ID NO: 630 - protein, 318 aa, synthetic construct
  REGION 1..318: note = MAGA8__Homo_sapiens__P43361
MLLGQKSQRYKAEEGLQAQGEAPGLMDVQIPTAEEQKAASSSSTLIMGTLEEVTDSGSPSPPQSPEGASSSLTVTDSTLWSQSDEGSSSNEEEGPSTSPDPAHLESLFREALDEKVAELVRFLLRKYQIKEPVTKAEMLESVIKNYKNHFPDIFSKASECMQVIFGIDVKEVDPAGHSYILVTCLGLSYDGLLGDDQSTPKTGLLIIVLGMILMEGSRAPEEAIWEALSVMGLYDGREHSVYWKLRKLLTQEWVQENYLEYRQAPGSDPVRYEFLWGPRALAETSYVKVLEHVVRVNARVRISYPSLHEEALGEEKGV

SEQ ID NO: 631 - protein, 429 aa, synthetic construct
  REGION 1..429: note = MAGAB__Homo_sapiens__P43364
METQFRRGGLGCSPASIKRKKKREDSGDFGLQVSTMFSEDDFQSTERAPYGPQLQWSQDLPRVQVFREQANLEDRSPRRTQRITGGEQVLWGPITQIFPTVRPADLTRVIMPLEQRSQHCKPEEGLQAQEEDLGLVGAQALQAEEQEAAFFSSTLNVGTLEELPAAESPSPPQSPQEESFSPTAMDAIFGSLSDEGSGSQEKEGPSTSPDLIDPESFSQDILHDKIIDLVHLLLRKYRVKGLITKAEMLGSVIKNYEDYFPEIFREASVCMQLLFGIDVKEVDPTSHSYVLVTSLNLSYDGIQCNEQSMPKSGLLIIVLGVIFMEGNCIPEEVMWEVLSIMGVYAGREHFLFGEPKRLLTQNWVQEKYLVYRQVPGTDPACYEFLWGPRAHAETSKMKVLEYIANANGRDPTSYPSLYEDALREEGEGV

SEQ ID NO: 632 - protein, 369 aa, synthetic construct; identical to SEQ ID NO: 258
  REGION 1..369: note = MAGE-A10__Homo_sapiens__A0A024RC14

SEQ ID NO: 633 - protein, 314 aa, synthetic construct; identical to SEQ ID NO: 259
  REGION 1..314: note = MAGE-A12__Homo_sapiens__P43365

SEQ ID NO: 634 - protein, 309 aa, synthetic construct; identical to SEQ ID NO: 260
  REGION 1..309: note = MAGE-A1__Homo_sapiens__P43355

SEQ ID NO: 635 - protein, 314 aa, synthetic construct; identical to SEQ ID NO: 261
  REGION 1..314: note = MAGE-A2__Homo_sapiens__P43356

SEQ ID NO: 636 - protein, 314 aa, synthetic construct; identical to SEQ ID NO: 262
  REGION 1..314: note = MAGE-A3__Homo_sapiens__P43357

SEQ ID NO: 637 - protein, 317 aa, synthetic construct; identical to SEQ ID NO: 263
  REGION 1..317: note = MAGE-A4__Homo_sapiens__A0A024RC12

SEQ ID NO: 638 - protein, 317 aa, synthetic construct; identical to SEQ ID NO: 263
  REGION 1..317: note = MAGE-A4__Homo_sapiens__P43358

SEQ ID NO: 639 - protein, 317 aa, synthetic construct; identical to SEQ ID NO: 265
  REGION 1..317: note = MAGE-A4__Homo_sapiens__Q1RN33

SEQ ID NO: 640 - protein, 314 aa, synthetic construct [sequence omitted]

SEQ ID NO: 641 - protein, 314 aa, synthetic construct; identical to SEQ ID NO: 267
  REGION 1..314: note = MAGE-A6__Homo_sapiens__P43360

SEQ ID NO: 642 - protein, 314 aa, synthetic construct [sequence omitted]

SEQ ID NO: 643 - protein, 315 aa, synthetic construct; identical to SEQ ID NO: 269
  REGION 1..315: note = MAGE-A9__Homo_sapiens__P43362

SEQ ID NO: 644 - protein, 347 aa, synthetic construct; identical to SEQ ID NO: 270
  REGION 1..347: note = MAGE-B10__Homo_sapiens__Q96LZ2

SEQ ID NO: 645 - protein, 324 aa, synthetic construct; identical to SEQ ID NO: 271
  REGION 1..324: note = MAGE-B16__Homo_sapiens__A2A368

SEQ ID NO: 646 - protein, 336 aa, synthetic construct; identical to SEQ ID NO: 272
  REGION 1..336: note = MAGE-B17__Homo_sapiens__A8MXT2

SEQ ID NO: 647 - protein, 347 aa, synthetic construct [sequence omitted]

SEQ ID NO: 648 - protein, 319 aa, synthetic construct; identical to SEQ ID NO: 274
  REGION 1..319: note = MAGE-B2__Homo_sapiens__O15479

SEQ ID NO: 649 - protein, 346 aa, synthetic construct; identical to SEQ ID NO: 275
  REGION 1..346: note = MAGE-B3__Homo_sapiens__O15480

SEQ ID NO: 650 - protein, 346 aa, synthetic construct; identical to SEQ ID NO: 276
  REGION 1..346: note = MAGE-B4__Homo_sapiens__O15481

SEQ ID NO: 651 - protein, 275 aa, synthetic construct; identical to SEQ ID NO: 277
  REGION 1..275: note = MAGE-B5__Homo_sapiens__Q9BZ81

SEQ ID NO: 652 - protein, 407 aa, synthetic construct; identical to SEQ ID NO: 278
  REGION 1..407: note = MAGE-B6__Homo_sapiens__Q8N7X4

SEQ ID NO: 653 - protein, 1142 aa, synthetic construct; identical to SEQ ID NO: 279
  REGION 1..1142: note = MAGE-C1__Homo_sapiens__O60732

SEQ ID NO: 654 - protein, 373 aa, synthetic construct; identical to SEQ ID NO: 280
  REGION 1..373: note = MAGE-C2__Homo_sapiens__Q9UBF1

SEQ ID NO: 655 - protein, 643 aa, synthetic construct; identical to SEQ ID NO: 281
  REGION 1..643: note = MAGE-C3__Homo_sapiens__Q8TD91

SEQ ID NO: 656 - protein, 778 aa, synthetic construct; identical to SEQ ID NO: 282
  REGION 1..778: note = MAGE-D1__Homo_sapiens__Q9Y5V3

SEQ ID NO: 657 - protein, 606 aa, synthetic construct; identical to SEQ ID NO: 283
  REGION 1..606: note = MAGE-D2__Homo_sapiens__Q9UNF1

SEQ ID NO: 658 - protein, 741 aa, synthetic construct; identical to SEQ ID NO: 284
  REGION 1..741: note = MAGE-D4__Homo_sapiens__Q96JG8

SEQ ID NO: 659 - protein, 373 aa, synthetic construct [sequence omitted]

SEQ ID NO: 660 - protein, 957 aa, synthetic construct; identical to SEQ ID NO: 286
  REGION 1..957: note = MAGE-E1_(MAGE1)__Homo_sapiens__Q9HCI5

SEQ ID NO: 661 - protein, 523 aa, synthetic construct; identical to SEQ ID NO: 287
  REGION 1..523: note = MAGE-E2__Homo_sapiens__Q8TD90

SEQ ID NO: 662 - protein, 307 aa, synthetic construct; identical to SEQ ID NO: 288
  REGION 1..307: note = MAGE-F1__Homo_sapiens__Q9HAY2

SEQ ID NO: 663 - protein, 219 aa, synthetic construct; identical to SEQ ID NO: 289
  REGION 1..219: note = MAGE-H1__Homo_sapiens__Q9H213

SEQ ID NO: 664 - protein, 1249 aa, synthetic construct; identical to SEQ ID NO: 290
  REGION 1..1249: note = MAGEL2__Homo_sapiens__Q9UJ55

SEQ ID NO: 665 - protein, 93 aa, synthetic construct
  REGION 1..93: note = mammaglobin_A__Homo_sapiens__Q13296
MKLLMVLMLAALSQHCYAGSGCPLLENVISKTINPQVSKTEYKELLQEFIDDNATTNAIDELKECFLNQTDETLSNVEVFMQLIYDSSLCDLF

SEQ ID NO: 666 - protein, 120 aa, synthetic construct
  REGION 1..120: note = mammaglobin_A__Homo_sapiens__Q6NX70
MKLLMVLMLAALSQHCYAGSGCPLLENVISKTINPQVSKTEYKELLQEFIDDNATTNAIDELKECFLNQTDETLSNVEVFMVISFSSYKLFKSPDQGQVGSSFLTDNAKATSEQAFSYIG

SEQ ID NO: 667 - protein, 118 aa, synthetic construct
  REGION 1..118: note = MART-1/melan-A__Homo_sapiens__Q16655
MPREDAHFIYGYPKKGHGHSYTTAEEAAGIGILTVILGVLLLIGCWYCRRRNGYRALMDKSLHVGTQCALTRRCPQEGFDHRDSKVSLQEKNCEPVVPNAPPAYEKLSAEQSPPPYSP

SEQ ID NO: 668 - protein, 493 aa, synthetic construct
  REGION 1..493: note = MART-2__Homo_sapiens__Q5VTY9
MLPRWELALYLLASLGFHFYSFYEVYKVSREHEEELDQEFELETDTLFGGLKKDATDFEWSFWMEWGKQWLVWLLLGHMVVSQMATLLARKHRPWILMLYGMWACWCVLGTPGVAMVLLHTTISFCVAQFRSQLLTWLCSLLLLSTLRLQGVEEVKRRWYKTENEYYLLQFTLTVRCLYYTSFSLELCWQQLPAASTSYSFPWMLAYVFYYPVLHNGPILSFSEFIKQMQQQEHDSLKASLCVLALGLGRLLCWWWLAELMAHLMYMHAIYSSIPLLETVSCWTLGGLALAQVLFFYVKYLVLFGVPALLMRLDGLTPPALPRCVSTMFSFTGMWRYFDVGLHNFLIRYVYIPVGGSQHGLLGTLFSTAMTFAFVSYWHGGYDYLWCWAALNWLGVTVENGVRRLVETPCIQDSLARYFSPQARRRFHAALASCSTSMLILSNLVFLGGNEVGKTYWNRIFIQGWPWVTLSVLGFLYCYSHVGIAWAQTYATD

SEQ ID NO: 669 - protein, 317 aa, synthetic construct
  REGION 1..317: note = MC1_R__Homo_sapiens__Q01726
MAVQGSQRRLLGSLNSTPTAIPQLGLAANQTGARCLEVSISDGLFLSLGLVSLVENALVVATIAKNRNLHSPMYCFICCLALSDLLVSGSNVLETAVILLLEAGALVARAAVLQQLDNVIDVITCSSMLSSLCFLGAIAVDRYISIFYALRYHSIVTLPRARRAVAAIWVASVVFSTLFIAYYDHVAVLLCLVVFFLAMLVLMAVLYVHMLARACQHAQGIARLHKRQRPVHQGFGLKGAVTLTILLGIFFLCWGPFFLHLTLIVLCPEHPTCGCIFKNFNLFLALIICNAIIDPLIYAFHSQELRRTLKEVLTCSW

SEQ ID NO: 670 - protein, 317 aa, synthetic construct; identical to SEQ ID NO: 669
  REGION 1..317: note = MC1_R__Homo_sapiens__Q1JUL4

SEQ ID NO: 671 - protein, 317 aa, synthetic construct
  REGION 1..317: note = MC1_R__Homo_sapiens__Q1JUL6
MAVQGSQRRLLGSLNSTPTAIPQLGLAANQTGARCLEVSISDGLFLSLGLVSLVENALVVATIAKNRNLHSPMYCFICCLALSDLLVSGSNVLETAVILLLEAGALVARAAVLQQLDNVIDVITCSSMLSSLCFLGAIAVDRYISIFYALRYHSIVTLPRARQAVAAIWVASVVFSTLFIAYYDHVAVLLCLVVFFLAMLVLMAVLYVHMLARACQHAQGIARLHKRQRPVHQGFGLKGAVTLTILLGIFFLCWGPFFLHLTLIVLCPEHPTCGCIFKNFNLFLALIICNAIIDPLIYAFHSQELRRTLKEVLTCSW

SEQ ID NO: 672 - protein, 317 aa, synthetic construct
  REGION 1..317: note = MC1_R__Homo_sapiens__Q1JUL8
MAVQGSQRRLLGSLNSTPTAIPQLGLAANQTGARCLEVSISDGLFLSLGLVSLVENALVVATIAKNRNLHSPMYCFICCLALSDLLVSGSNVLETAVILLLEAGALVARAAVLQQLDNVTDVITCSSMLSSLCFLGAIAVDRYISIFYALRYHSIVTLPRARRAVAAIWVASVVFSTLFIAYYDHVAVLLCLVVFFLAMLVLMAVLYVHMLARACQHAQGIARLHKRQRPVHQGFGLKGAVTLTILLGIFFLCWGPFFLHLTLIVLCPEHPTCGCIFKNFNLFLALIICNAIIDPLIYAFHSQELRRTLKEVLTCSW

SEQ ID NO: 673 - protein, 317 aa, synthetic construct [sequence omitted]

SEQ ID NO: 674 - protein, 317 aa, synthetic construct [sequence omitted]

SEQ ID NO: 675 - protein, 317 aa, synthetic construct [sequence omitted]

SEQ ID NO: 676 - protein, 317 aa, synthetic construct [sequence omitted]

SEQ ID NO: 677 - protein, 317 aa, synthetic construct [sequence omitted]

SEQ ID NO: 678 - protein, 316 aa, synthetic construct
  REGION 1..316: note = MC1_R__Homo_sapiens__Q1JUM5
MAVQGSQRRLLGSLNSTPTAIPQLGLAANQTGARCLEVSISDGLFLSLGLVSLVENALVVATIAKNRNLHSPMYCFICCLALSDLLVSGSNVLETAVILLLEAGALVARAAVLQQLDNVIDVITCSSMLSSLCFLGAIAVDRYISIYALRYHSIVTLPRARQAVAAIWVASVVFSTLFIAYYDHVAVLLCLVVFFLAMLVLMAVLYVHMLARACQHAQGIARLHKRQRPVHQGFGLKGAVTLTILLGIFFLCWGPFFLHLTLIVLCPEHPTCGCIFKNFNLFLALIICNAIIDPLIYAFHSQELRRTLKEVLTCSW

SEQ ID NO: 679 - protein, 317 aa, synthetic construct [sequence omitted]

SEQ ID NO: 680 - protein, 317 aa, synthetic construct [sequence omitted]

SEQ ID NO: 681 - protein, 317 aa, synthetic construct [sequence omitted]

SEQ ID NO: 682 - protein, 317 aa, synthetic construct [sequence omitted]

SEQ ID NO: 683 - protein, 317 aa, synthetic construct [sequence omitted]

SEQ ID NO: 684 - protein, 317 aa, synthetic construct [sequence omitted]

SEQ ID NO: 685 - protein, 317 aa, synthetic construct [sequence omitted]

SEQ ID NO: 686 - protein, 317 aa, synthetic construct [sequence omitted]

SEQ ID NO: 687 - protein, 317 aa, synthetic construct [sequence omitted]

SEQ ID NO: 688 - protein, 317 aa, synthetic construct [sequence omitted]

SEQ ID NO: 689 - protein, 317 aa, synthetic construct [sequence omitted]

SEQ ID NO: 690 - protein, 317 aa, synthetic construct [sequence omitted]

SEQ ID NO: 691 - protein, 317 aa, synthetic construct
  REGION 1..317: note = MC1_R__Homo_sapiens__V9Q7F1
MAVQGSQRRLLGSLNSTPTAIPQLGLAANQTGARCLEVSISDGLFLSLGLVSLVENALVVATIAKNRNLHSPMYCFICCLALSDLLVSGSNVLETAVILLLEAGALVARAAVLQQLDNVIDVITCSSMLSSLCFLGAIAVDRYISIFYALRYHSTVTLPRARRAVAAIWVASVVFSTLFIAYYDHVAVLLCLVVFFLAMLVLMAVLYVHMLARACQHAQGIARLHKRQRPVHQGFGLKGAVTLTILLGIFFLCWGPFFLHLTLIVLCPEHPTCGCIFKNFNLFLALIICNAIIDPLIYAFHSQELRRTLKEVLTCSW

SEQ ID NO: 692 - protein, 317 aa, synthetic construct [sequence omitted]

SEQ ID NO: 693 - protein, 317 aa, synthetic construct [sequence omitted]

SEQ ID NO: 694 - protein, 317 aa, synthetic construct [sequence omitted]

SEQ ID NO: 695 - protein, 317 aa, synthetic construct [sequence omitted]

SEQ ID NO: 696 - protein, 317 aa, synthetic construct [sequence omitted]

SEQ ID NO: 697 - protein, 317 aa, synthetic construct [sequence omitted]

SEQ ID NO: 698 - protein, 317 aa, synthetic construct [sequence omitted]

SEQ ID NO: 699 - protein, 317 aa, synthetic construct [sequence omitted]

SEQ ID NO: 700 - protein, 317 aa, synthetic construct [sequence omitted]

SEQ ID NO: 701 - protein, 317 aa, synthetic construct [sequence omitted]

SEQ ID NO: 702 - protein, 317 aa, synthetic construct [sequence omitted]

SEQ ID NO: 703 - protein, 317 aa, synthetic construct [sequence omitted]

SEQ ID NO: 704 - protein, 317 aa, synthetic construct [sequence omitted]

SEQ ID NO: 705 - protein, 317 aa, synthetic construct [sequence omitted]

SEQ ID NO: 706 - protein, 317 aa, synthetic construct [sequence omitted]

SEQ ID NO: 707 - protein, 317 aa, synthetic construct [sequence omitted]

SEQ ID NO: 708 - protein, 630 aa, synthetic construct
  REGION 1..630: note = mesothelin__Homo_sapiens__Q13421
MALPTARPLLGSCGTPALGSLLFLLFSLGWVQPSRTLAGETGQEAAPLDGVLANPPNISSLSPRQLLGFPCAEVSGLSTERVRELAVALAQKNVKLSTEQLRCLAHRLSEPPEDLDALPLDLLLFLNPDAFSGPQACTRFFSRITKANVDLLPRGAPERQRLLPAALACWGVRGSLLSEADVRALGGLACDLPGRFVAESAEVLLPRLVSCPGPLDQDQQEAARAALQGGGPPYGPPSTWSVSTMDALRGLLPVLGQPIIRSIPQGIVAAWRQRSSRDPSWRQPERTILRPRFRREVEKTACPSGKKAREIDESLIFYKKWELEACVDAALLATQMDRVNAIPFTYEQLDVLKHKLDELYPQGYPESVIQHLGYLFLKMSPEDIRKWNVTSLETLKALLEVNKGHEMSPQAPRRPLPQVATLIDRFVKGRGQLDKDTLDTLTAFYPGYLCSLSPEELSSVPPSSIWAVRPQDLDTCDPRQLDVLYPKARLAFQNMNGSEYFVKIQSFLGGAPTEDLKALSQQNVSMDLATFMKLRTDAVLPLTVAEVQKLLGPHVEGLKAEERHRPVRDWILRQRQDDLDTLGLGLQGGIPNGYLVLDLSMQEALSGTPCLLGPGPVLTVLALLLASTLA

SEQ ID NO: 709 - protein, 504 aa, synthetic construct
  REGION 1..504: note = MITF__Homo_sapiens__O75030-8
MEALRVQMFMPCSFESLYLSSAEHPGASKPPISSSSMTSRILLRQQLMREQMQEQERREQQQKLQAAQFMQQRVPVSQTPAINVSVPTTLPSATQVPMEVLKVQTHLENPTKYHIQQAQRQQVKQYLSTTLANKHANQVLSLPCPNQPGDHVMPPVPGSSAPNSPMAMLTLNSNCEKEGFYKFEEQNRAESECPGMNTHSRASCMQMDDVIDDIISLESSYNEEILGLMDPALQMANTLPVSGNLIDLYGNQGLPPPGLTISNSCPANLPNIKRELTESEARALAKERQKKDNHNLIERRRRFNINDRIKELGTLIPKSNDPDMRWNKGTILKASVDYIRKLQREQQRAKELENRQKKLEHANRHLLLRIQELEMQARAHGLSLIPSTGLCSPDLVNRIIKQEPVLENCSQDLLQHHADLTCTTTLDLTDGTITFNNNLGTGTEANQAYSVPTKMGSKLEDILMDDTLSPVGVTDPLLSSVSPGASKTSSRRSSMSMEETEHTC

SEQ ID NO: 710 - protein, 419 aa, synthetic construct
  REGION 1..419: note = MITF__Homo_sapiens__O75030-9
MLEMLEYNHYQVQTHLENPTKYHIQQAQRQQVKQYLSTTLANKHANQVLSLPCPNQPGDHVMPPVPGSSAPNSPMAMLTLNSNCEKEGFYKFEEQNRAESECPGMNTHSRASCMQMDDVIDDIISLESSYNEEILGLMDPALQMANTLPVSGNLIDLYGNQGLPPPGLTISNSCPANLPNIKRELTACIFPTESEARALAKERQKKDNHNLIERRRRFNINDRIKELGTLIPKSNDPDMRWNKGTILKASVDYIRKLQREQQRAKELENRQKKLEHANRHLLLRIQELEMQARAHGLSLIPSTGLCSPDLVNRIIKQEPVLENCSQDLLQHHADLTCTTTLDLTDGTITFNNNLGTGTEANQAYSVPTKMGSKLEDILMDDTLSPVGVTDPLLSSVSPGASKTSSRRSSMSMEETEHTC

SEQ ID NO: 711 - protein, 526 aa, synthetic construct
  REGION 1..526: note = MITF__Homo_sapiens__O75030
MQSESGIVPDFEVGEEFHEEPKTYYELKSQPLKSSSSAEHPGASKPPISSSSMTSRILLRQQLMREQMQEQERREQQQKLQAAQFMQQRVPVSQTPAINVSVPTTLPSATQVPMEVLKVQTHLENPTKYHIQQAQRQQVKQYLSTTLANKHANQVLSLPCPNQPGDHVMPPVPGSSAPNSPMAMLTLNSNCEKEGFYKFEEQNRAESECPGMNTHSRASCMQMDDVIDDIISLESSYNEEILGLMDPALQMANTLPVSGNLIDLYGNQGLPPPGLTISNSCPANLPNIKRELTACIFPTESEARALAKERQKKDNHNLIERRRRFNINDRIKELGTLIPKSNDPDMRWNKGTILKASVDYIRKLQREQQRAKELENRQKKLEHANRHLLLRIQELEMQARAHGLSLIPSTGLCSPDLVNRIIKQEPVLENCSQDLLQHHADLTCTTTLDLTDGTITFNNNLGTGTEANQAYSVPTKMGSKLEDILMDDTLSPVGVTDPLLSSVSPGASKTSSRRSSMSMEETEHTC

SEQ ID NO: 712 - protein, 354 aa, synthetic construct [sequence omitted]

SEQ ID NO: 713 - protein, 267 aa, synthetic construct
  REGION 1..267: note = MMP7__Homo_sapiens__P09237
MRLTVLCAVCLLPGSLALPLPQEAGGMSELQWEQAQDYLKRFYLYDSETKNANSLEAKLKEMQKFFGLPITGMLNSRVIEIMQKPRCGVPDVAEYSLFPNSPKWTSKVVTYRIVSYTRDLPHITVDRLVSKALNMWGKEIPLHFRKVVWGTADIMIGFARGAHGDSYPFDGPGNTLAHAFAPGTGLGGDAHFDEDERWTDGSSLGINFLYAATHELGHSLGMGHSSDPNAVMYPTYGNGDPQNFKLSQDDIKGIQKLYGKRSNSRKK

SEQ ID NO: 714 - protein, 1255 aa, synthetic construct
  REGION 1..1255: note = MUC-1__Homo_sapiens__AAA60019
MTPGTQSPFFLLLLLTVLTVVTGSGHASSTPGGEKETSATQRSSVPSSTEKNAVSMTSSVLSSHSPGSGSSTTQGQDVTLAPATEPASGSAATWGQDVTSVPVTRPALGSTTPPAHDVTSAPDNKPAPGSTAPPAHGVTSAPDTRPAPGSTAPPAHGVTSAPDTRPAPGSTAPPAHGVTSAPDTRPAPGSTAPPAHGVTSAPDTRPAPGSTAPPAHGVTSAPDTRPAPGSTAPPAHGVTSAPDTRPAPGSTAPPAHGVTSAPDTRPAPGSTAPPAHGVTSAPDTRPAPGSTAPPAHGVTSAPDTRPAPGSTAPPAHGVTSAPDTRPAPGSTAPPAHGVTSAPDTRPAPGSTAPPAHGVTSAPDTRPAPGSTAPPAHGVTSAPDTRPAPGSTAPPAHGVTSAPDTRPAPGSTAPPAHGVTSAPDTRPAPGSTAPPAHGVTSAPDTRPAPGSTAPPAHGVTSAPDTRPAPGSTAPPAHGVTSAPDTRPAPGSTAPPAHGVTSAPDTRPAPGSTAPPAHGVTSAPDTRPAPGSTAPPAHGVTSAPDTRPAPGSTAPPAHGVTSAPDTRPAPGSTAPPAHGVTSAPDTRPAPGSTAPPAHGVTSAPDTRPAPGSTAPPAHGVTSAPDTRPAPGSTAPPAHGVTSAPDTRPAPGSTAPPAHGVTSAPDTRPAPGSTAPPAHGVTSAPDTRPAPGSTAPPAHGVTSAPDTRPAPGSTAPPAHGVTSAPDTRPAPGSTAPPAHGVTSAPDTRPAPGSTAPPAHGVTSAPDTRPAPGSTAPPAHGVTSAPDTRPAPGSTAPPAHGVTSAPDTRPAPGSTAPPAHGVTSAPDTRPAPGSTAPPAHGVTSAPDTRPAPGSTAPPAHGVTSAPDTRPAPGSTAPPAHGVTSAPDTRPAPGSTAPPAHGVTSAPDTRPAPGSTAPPAHGVTSAPDTRPAPGSTAPPAHGVTSAPDNRPALGSTAPPVHNVTSASGSASGSASTLVHNGTSARATTTPASKSTPFSIPSHHSDTPTTLASHSTKTDASSTHHSSVPPLTSSNHSTSPQLSTGVSFFFLSFHISNLQFNSSLEDPSTDYYQELQRDISEMFLQIYKQGGFLGLSNIKFRPGSVVVQLTLAFREGTINVHDVETQFNQYKTEAASRYNLTISDVSVSDVPFPFSAQSGAGVPGWGIALLVLVCVLVALAIVYLIALAVCQCRRKNYGQLDIFPARDTYHPMSEYPTYHTHGRYVPPSSTDRSPYEKVSAGNGGSSLSYTNPAVAAASANL

SEQ ID NO: 715 - protein, 711 aa, synthetic construct
  REGION 1..711: note = MUM-1/m__Homo_sapiens__NP_116242
MMADAKYVLCRWEKRLWPAKVLARTATSTKNKRRKEYFLAVQILSLEEKIKVKSTEVEILEKSQIEAIASSLASQNEVPAAPLEELAYRRSLRVALDVLSEGSIWSQESSAGTGRADRSLRGKPMEHVSSPCDSNSSSLPRGDVLGSSRPHRRRPCVQQSLSSSFTCEKDPECKVDHKKGLRKSENPRGPLVLPAGGGAQDESGSRIHHKNWTLASKRGGNSAQKASLCLNGSSLSEDDTERDMGSKGGSWAAPSLPSGVREDDPCANAEGHDPGLPLGSLTAPPAPEPSACSEPGECPAKKRPRLDGSQRPPAVQLEPMAAGAAPSPGPGPGPRESVTPRSTARLGPPPSHASADATRCLPCPDSQKLEKECQSSEESMGSNSMRSILEEDEEDEEPPRVLLYHEPRSFEVGMLVWHKHKKYPFWPAVVKSVRQRDKKASVLYIEGHMNPKMKGFTVSLKSLKHFDCKEKQTLLNQAREDFNQDIGWCVSLITDYRVRLGCGSFAGSFLEYYAADISYPVRKSIQQDVLGTKLPQLSKGSPEEPVVGCPLGQRQPCRKMLPDRSRAARDRANQKLVEYIVKAKGAESHLRAILKSRKPSRWLQTFLSSSQYVTCVETYLEDEGQLDLVVKYLQGVYQEVGAKVLQRTNGDRIRFILDVLLPEAIICAISAVDEVDYKTAEEKYIKGPSLSYREKEIFDNQLLEERNRRRR

SEQ ID NO: 716 - protein, 145 aa, synthetic construct
  REGION 1..145: note = MUM-2/m__Homo_sapiens__Q9Y5R8
MTVHNLYLFDRNGVCLHYSEWHRKKQAGIPKEEEYKLMYGMLFSIRSFVSKMSPLDMKDGFLAFQTSRYKLHYYETPTGIKVVMNTDLGVGPIRDVLHHIYSALYVELVVKNPLCPLGQTVQSELFRSRLDSYVRSLPFFSARAG

SEQ ID NO: 717 - protein, 1043 aa, synthetic construct
  REGION 1..1043: note = MYO1A__Homo_sapiens__Q9UBC5
MPLLEGSVGVEDLVLLEPLVEESLLKNLQLRYENKEIYTYIGNVVISVNPYQQLPIYGPEFIAKYQDYTFYELKPHIYALANVAYQSLRDRDRDQCILITGESGSGKTEASKLVMSYVAAVCGKGEQVNSVKEQLLQSNPVLEAFGNAKTIRNNNSSRFGKYMDIEFDFKGSPLGGVITNYLLEKSRLVKQLKGERNFHIFYQLLAGADEQLLKALKLERDTTGYAYLNHEVSRVDGMDDASSFRAVQSAMAVIGFSEEEIRQVLEVTSMVLKLGNVLVADEFQASGIPASGIRDGRGVREIGEMVGLNSEEVERALCSRTMETAKEKVVTALNVMQAQYARDALAKNIYSRLFDWIVNRINESIKVGIGEKKKVMGVLDIYGFEILEDNSFEQFVINYCNEKLQQVFIEMTLKEEQEEYKREGIPWTKVDYFDNGIICKLIEHNQRGILAMLDEECLRPGVVSDSTFLAKLNQLFSKHGHYESKVTQNAQRQYDHTMGLSCFRICHYAGKVTYNVTSFIDKNNDLLFRDLLQAMWKAQHPLLRSLFPEGNPKQASLKRPPTAGAQFKSSVAILMKNLYSKSPNYIRCIKPNEHQQRGQFSSDLVATQARYLGLLENVRVRRAGYAHRQGYGPFLERYRLLSRSTWPHWNGGDREGVEKVLGELSMSSGELAFGKTKIFIRSPKTLFYLEEQRRLRLQQLATLIQKIYRGWRCRTHYQLMRKSQILISSWFRGNMQKKCYGKIKASVLLIQAFVRGWKARKNYRKYFRSEAALTLADFIYKSMVQKFLLGLKNNLPSTNVLDKTWPAAPYKCLSTANQELQQLFYQWKCKRFRDQLSPKQVEILREKLCASELFKGKKASYPQSVPIPFCGDYIGLQGNPKLQKLKGGEEGPVLMAEAVKKVNRGNGKTSSRILLLTKGHVILTDTKKSQAKIVIGLDNVAGVSVTSLKDGLFSLHLSEMSSVGSKGDFLLVSEHVIELLTKMYRAVLDATQRQLTVTVTEKFSVRFKENSVAVKVVQGPAGGDNSKLRYKKKGSHCLEVTVQ

SEQ ID NO: 718 - protein, 1136 aa, synthetic construct
  REGION 1..1136: note = MYO1B__Homo_sapiens__O43795
MAKMEVKTSLLDNMIGVGDMVLLEPLNEETFINNLKKRFDHSEIYTYIGSVVISVNPYRSLPIYSPEKVEEYRNRNFYELSPHIFALSDEAYRSLRDQDKDQCILITGESGAGKTEASKLVMSYVAAVCGKGAEVNQVKEQLLQSNPVLEAFGNAKTVRNDNSSRFGKYMDIEFDFKGDPLGGVISNYLLEKSRVVKQPRGERNFHVFYQLLSGASEELLNKLKLERDFSRYNYLSLDSAKVNGVDDAANFRTVRNAMQIVGFMDHEAESVLAVVAAVLKLGNIEFKPESRVNGLDESKIKDKNELKEICELTGIDQSVLERAFSFRTVEAKQEKVSTTLNVAQAYYARDALAKNLYSRLFSWLVNRINESIKAQTKVRKKVMGVLDIYGFEIFEDNSFEQFIINYCNEKLQQIFIELTLKEEQEEYIREDIEWTHIDYFNNAIICDLIENNTNGILAMLDEECLRPGTVTDETFLEKLNQVCATHQHFESRMSKCSRFLNDTSLPHSCFRIQHYAGKVLYQVEGFVDKNNDLLYRDLSQAMWKASHALIKSLFPEGNPAKINLKRPPTAGSQFKASVATLMKNLQTKNPNYIRCIKPNDKKAAHIFNEALVCHQIRYLGLLENVRVRRAGYAFRQAYEPCLERYKMLCKQTWPHWKGPARSGVEVLFNELEIPVEEYSFGRSKIFIRNPRTLFKLEDLRKQRLEDLATLIQKIYRGWKCRTHFLLMKKSQIVIAAWYRRYAQQKRYQQTKSSALVIQSYIRGWKARKILRELKHQKRCKEAVTTIAAYWHGTQARRELRRLKEEARNKHAIAVIWAYWLGSKARRELKRLKEEARRKHAVAVIWAYWLGLKVRREYRKFFRANAGKKIYEFTLQRIVQKYFLEMKNKMPSLSPIDKNWPSRPYLFLDSTHKELKRIFHLWRCKKYRDQFTDQQKLIYEEKLEASELFKDKKALYPSSVGQPFQGAYLEINKNPKYKKLKDAIEEKIIIAEVVNKINRANGKSTSRIFLLTNNNLLLADQKSGQIKSEVPLVDVTKVSMSSQNDGFFAVHLKEGSEAASKGDFLFSSDHLIEMATKLYRTTLSQTKQKLNIEISDEFLVQFRQDKVCVKFIQGNQKNGSVPTCKRKNNRLLEVAVP

SEQ ID NO: 719 - protein, 1063 aa, synthetic construct
  REGION 1..1063: note = MYO1C__Homo_sapiens__O00159
MALQVELVPTGEIIRVVHPHRPCKLALGSDGVRVTMESALTARDRVGVQDFVLLENFTSEAAFIENLRRRFRENLIYTYIGPVLVSVNPYRDLQIYSRQHMERYRGVSFYEVPPHLFAVADTVYRALRTERRDQAVMISGESGAGKTEATKRLLQFYAETCPAPERGGAVRDRLLQSNPVLEAFGNAKTLRNDNSSRFGKYMDVQFDFKGAPVGGHILSYLLEKSRVVHQNHGERNFHIFYQLLEGGEEETLRRLGLERNPQSYLYLVKGQCAKVSSINDKSDWKVVRKALTVIDFTEDEVEDLLSIVASVLHLGNIHFAANEESNAQVTTENQLKYLTRLLSVEGSTLREALTHRKIIAKGEELLSPLNLEQAAYARDALAKAVYSRTFTWLVGKINRSLASKDVESPSWRSTTVLGLLDIYGFEVFQHNSFEQFCINYCNEKLQQLFIELTLKSEQEEYEAEGIAWEPVQYFNNKIICDLVEEKFKGIISILDEECLRPGEATDLTFLEKLEDTVKHHPHFLTHKLADQRTRKSLGRGEFRLLHYAGEVTYSVTGFLDKNNDLLFRNLKETMCSSKNPIMSQCFDRSELSDKKRPETVATQFKMSLLQLVEILQSKEPAYVRCIKPNDAKQPGRFDEVLIRHQVKYLGLLENLRVRRAGFAYRRKYEAFLQRYKSLCPETWPTWAGRPQDGVAVLVRHLGYKPEEYKMGRTKIFIRFPKTLFATEDALEVRRQSLATKIQAAWRGFHWRQKFLRVKRSAICIQSWWRGTLGRRKAAKRKWAAQTIRRLIRGFVLRHAPRCPENAFFLDHVRTSFLLNLRRQLPQNVLDTSWPTPPPALREASELLRELCIKNMVWKYCRSISPEWKQQLQQKAVASEIFKGKKDNYPQSVPRLFISTRLGTDEISPRVLQALGSEPIQYAVPVVKYDRKGYKPRSRQLLLTPNAVVIVEDAKVKQRIDYANLTGISVSSLSDSLFVLHVQRADNKQKGDVVLQSDHVIETLTKTALSANRVNSININQGSITFAGGPGRDGTIDFTPGSELLITKAKNGHLAVVAPRLNSR

SEQ ID NO: 720 - protein, 1006 aa, synthetic construct
  REGION 1..1006: note = MYO1D__Homo_sapiens__O94832
MAEQESLEFGKADFVLMDTVSMPEFMANLRLRFEKGRIYTFIGEVVVSVNPYKLLNIYGRDTIEQYKGRELYERPPHLFAIADAAYKAMKRRSKDTCIVISGESGAGKTEASKYIMQYIAAITNPSQRAEVERVKNMLLKSNCVLEAFGNAKTNRNDNSSRFGKYMDINFDFKGDPIGGHINNYLLEKSRVIVQQPGERSFHSFYQLLQGGSEQMLRSLHLQKSLSSYNYIHVGAQLKSSINDAAEFRVVADAMKVIGFKPEEIQTVYKILAAILHLGNLKFVVDGDTPLIENGKVVSIIAELLSTKTDMVEKALLYRTVATGRDIIDKQHTEQEASYGRDAFAKAIYERLFCWIVTRINDIIEVKNYDTTIHGKNTVIGVLDIYGFEIFDNNSFEQFCINYCNEKLQQLFIQLVLKQEQEEYQREGIPWKHIDYFNNQIIVDLVEQQHKGIIAILDDACMNVGKVTDEMFLEALNSKLGKHAHFSSRKLCASDKILEFDRDFRIRHYAGDVVYSVIGFIDKNKDTLFQDFKRLMYNSSNPVLKNMWPEGKLSITEVTKRPLTAATLFKNSMIALVDNLASKEPYYVRCIKPNDKKSPQIFDDERCRHQVEYLGLLENVRVRRAGFAFRQTYEKFLHRYKMISEFTWPNHDLPSDKEAVKKLIERCGFQDDVAYGKTKIFIRTPRTLFTLEELRAQMLIRIVLFLQKVWRGTLARMRYKRTKAALTIIRYYRRYKVKSYIHEVARRFHGVKTMRDYGKHVKWPSPPKVLRRFEEALQTIFNRWRASQLIKSIPASDLPQVRAKVAAVEMLKGQRADLGLQRAWEGNYLASKPDTPQTSGTFVPVANELKRKDKYMNVLFSCHVRKVNRFSKVEDRAIFVTDRHLYKMDPTKQYKVMKTIPLYNLTGLSVSNGKDQLVVFHTKDNKDLIVCLFSKQPTHESRIGELVGVLVNHFKSEKRHLQVNVTNPVQCSLHGKKCTVSVETRLNQPQPDFTKNRSGFILSVPGN

SEQ ID NO: 721 - protein, 1108 aa, synthetic construct
  REGION 1..1108: note = MYO1E__Homo_sapiens__Q12965
MGSKGVYQYHWQSHNVKHSGVDDMVLLSKITENSIVENLKKRYMDDYIFTYIGSVLISVNPFKQMPYFGEKEIEMYQGAAQYENPPHIYALADNMYRNMIIDRENQCVIISGESGAGKTVAAKYIMSYISRVSGGGTKVQHVKDIILQSNPLLEAFGNAKTVRNNNSSRFGKYFEIQFSPGGEPDGGKISNFLLEKSRVVMRNPGERSFHIFYQLIEGASAEQKHSLGITSMDYYYYLSLSGSYKVDDIDDRREFQETLHAMNVIGIFAEEQTLVLQIVAGILHLGNISFKEVGNYAAVESEEFLAFPAYLLGINQDRLKEKLTSRQMDSKWGGKSESIHVTLNVEQACYTRDALAKALHARVFDFLVDSINKAMEKDHEEYNIGVLDIYGFEIFQKNGFEQFCINFVNEKLQQIFIELTLKAEQEEYVQEGIRWTPIEYFNNKIVCDLIENKVNPPGIMSILDDVCATMHAVGEGADQTLLQKLQMQIGSHEHFNSWNQGFIIHHYAGKVSYDMDGFCERNRDVLFMDLIELMQSSELPFIKSLFPENLQADKKGRPTTAGSKIKKQANDLVSTLMKCTPHYIRCIKPNETKKPRDWEESRVKHQVEYLGLKENIRVRRAGYAYRRIFQKFLQRYAILTKATWPSWQGEEKQGVLHLLQSVNMDSDQFQLGRSKVFIKAPESLFLLEEMRERKYDGYARVIQKSWRKFVARKKYVQMREEASDLLLNKKERRRNSINRNFIGDYIGMEEHPELQQFVGKREKIDFADTVTKYDRRFKGVKRDLLLTPKCLYLIGREKVKQGPDKGLVKEVLKRKIEIERILSVSLSTMQDDIFILHEQEYDSLLESVFKTEFLSLLAKRYEEKTQKQLPLKFSNTLELKLKKENWGPWSAGGSRQVQFHQGFGDLAVLKPSNKVLQVSIGPGLPKNSRPTRRNTTQNTGYSSGTQNANYPVRAAPPPPGYHQNGVIRNQYVPYPHAPGSQRSNQKSLYTSMARPPLPRQQSTSSDRVSQTPESLDFLKVPDQGAAGVRRQTTSRPPPAGGRPKPQPKPKPQVPQCKALYAYDAQDTDELSFNANDIIDIIKEDPSGWWTGRLRGKQGLFPNNYVTKI

SEQ ID NO: 722 - protein, 1098 aa, synthetic construct
  REGION 1..1098: note = MYO1F__Homo_sapiens__O00160
MGSKERFHWQSHNVKQSGVDDMVLLPQITEDAIAANLRKRFMDDYIFTYIGSVLISVNPFKQMPYFTDREIDLYQGAAQYENPPHIYALTDNMYRNMLIDCENQCVIISGESGAGKTVAAKYIMGYISKVSGGGEKVQHVKDIILQSNPLLEAFGNAKTVRNNNSSRFGKYFEIQFSRGGEPDGGKISNFLLEKSRVVMQNENERNFHIYYQLLEGASQEQRQNLGLMTPDYYYYLNQSDTYQVDGTDDRSDFGETLSAMQVIGIPPSIQQLVLQLVAGILHLGNISFCEDGNYARVESVDLLAFPAYLLGIDSGRLQEKLTSRKMDSRWGGRSESINVTLNVEQAAYTRDALAKGLYARLFDFLVEAINRAMQKPQEEYSIGVLDIYGFEIFQKNGFEQFCINFVNEKLQQIFIELTLKAEQEEYVQEGIRWTPIQYFNNKVVCDLIENKLSPPGIMSVLDDVCATMHATGGGADQTLLQKLQAAVGTHEHFNSWSAGFVIHHYAGKVSYDVSGFCERNRDVLFSDLIELMQTSEQAFLRMLFPEKLDGDKKGRPSTAGSKIKKQANDLVATLMRCTPHYIRCIKPNETKRPRDWEENRVKHQVEYLGLKENIRVRRAGFAYRRQFAKFLQRYAILTPETWPRWRGDERQGVQHLLRAVNMEPDQYQMGSTKVFVKNPESLFLLEEVRERKFDGFARTIQKAWRRHVAVRKYEEMREEASNILLNKKERRRNSINRNFVGDYLGLEERPELRQFLGKRERVDFADSVTKYDRRFKPIKRDLILTPKCVYVIGREKVKKGPEKGQVCEVLKKKVDIQALRGVSLSTRQDDFFILQEDAADSFLESVFKTEFVSLLCKRFEEATRRPLPLTFSDTLQFRVKKEGWGGGGTRSVTFSRGFGDLAVLKVGGRTLTVSVGDGLPKSSKPTRKGMAKGKPRRSSQAPTRAAPAPPRGMDRNGVPPSARGGPLPLEIMSGGGTHRPPRGPPSTSLGASRRPRARPPSEHNTEFLNVPDQGMAGMQRKRSVGQRPVPGVGRPKPQPRTHGPRCRALYQYVGQDVDELSFNVNEVIEILMEDPSGWWKGRLHGQEGLFPGNYVEKI

SEQ ID NO: 723 - protein, 1018 aa, synthetic construct
  REGION 1..1018: note = MYO1G__Homo_sapiens__B0I1T2
MEDEEGPEYGKPDFVLLDQVTMEDFMRNLQLRFEKGRIYTYIGEVLVSVNPYQELPLYGPEAIARYQGRELYERPPHLYAVANAAYKAMKHRSRDTCIVISGESGAGKTEASKHIMQYIAAVTNPSQRAEVERVKDVLLKSTCVLEAFGNARTNRNHNSSRFGKYMDINFDFKGDPIGGHIHSYLLEKSRVLKQHVGERNFHAFYQLLRGSEDKQLHELHLERNPAVYNFTHQGAGLNMTVHSALDSDEQSHQAVTEAMRVIGFSPEEVESVHRILAAILHLGNIEFVETEEGGLQKEGLAVAEEALVDHVAELTATPRDLVLRSLLARTVASGGRELIEKGHTAAEASYARDACAKAVYQRLFEWVVNRINSVMEPRGRDPRRDGKDTVIGVLDIYGFEVFPVNSFEQFCINYCNEKLQQLFIQLILKQEQEEYEREGITWQSVEYFNNATIVDLVERPHRGILAVLDEACSSAGTITDRIFLQTLDMHHRHHLHYTSRQLCPTDKTMEFGRDFRIKHYAGDVTYSVEGFIDKNRDFLFQDFKRLLYNSTDPTLRAMWPDGQQDITEVTKRPLTAGTLFKNSMVALVENLASKEPFYVRCIKPNEDKVAGKLDENHCRHQVAYLGLLENVRVRRAGFASRQPYSRFLLRYKMTCEYTWPNHLLGSDKAAVSALLEQHGLQGDVAFGHSKLFIRSPRTLVTLEQSRARLIPIIVLLLQKAWRGTLARWRCRRLRAIYTIMRWFRRHKVRAHLAELQRRFQAARQPPLYGRDLVWPLPPAVLQPFQDTCHALFCRWRARQLVKNIPPSDMPQIKAKVAAMGALQGLRQDWGCRRAWARDYLSSATDNPTASSLFAQRLKTLQDKDGFGAVLFSSHVRKVNRFHKIRNRALLLTDQHLYKLDPDRQYRVMRAVPLEAVTGLSVTSGGDQLVVLHARGQDDLVVCLHRSRPPLDNRVGELVGVLAAHCQGEGRTLEVRVSDCIPLSHRGVRRLISVEPRPEQPEPDFRCARGSFTLLWPSR

SEQ ID NO: 724 - protein, 1022 aa, synthetic construct
  REGION 1..1022: note = MYO1H__Homo_sapiens__NP_001094891
MEGALTARDKVGVQDFVLLDAYTSESAFVDNLRKRFSENLIYTYIGTLLVSVNPYQELGIYTVSQMELYQGVNFFELPPHVYAIADNAYRMMCAELNNHFILISGESGAGKTEASKKILEYFAVTCPMTQSLQIARDRLLFSNPVLEAFGNARTLRNDNSSRFGKYMDIQFDFQGIPVGGHIISYLIEKSRVVYQNEGERNFHIFYQLLAGGEEERLSYLGLERDPQLYKYLSQGHCAKESSISDKNDWKTVSNAFSVIDFTEADLENLFGIIASVLHLGNIGFEEDDQGCATIPDTHEIKWIAKLLGVHPSVLLEALTHRKIEAKTEEVICPLTLELSVYARDAMAKAVYGRTFTWLVNKINSSLVNKDFTRKTVIGLLDIYGFEVFDKNGFEQFCINYCNEKLQQLLIERTLKAEQAEYEMEGIEWEPIKYFNNKIICDLVEERHKGIISILDEECIRPGPATDLSFLEKLEEKVGKHAHFETRKLAGPKGRKRIGWMEFRLLHYAGEVTYCTKGFLEKNNDLLYRHLKEVLCKSKNIILRECFLLAELENRRRPPTVGTQFKNSLSSLLETLISKEPSYIRCIKPNDRKEPSKFDDFLIRHQIKYLGLMEHLRVRRAGFAYRRKYEHFLQRYKSLCPDTWPHWHGPPAEGVERLIKYIGYKPEEYKLGKTKIFIRFPRTLFATEDAFEFSKHQLVARIQATYKRCLGRREYVKKRQAAIKLEAHWRGALARKAIQRRKWAVRIIRKFIKGFISRNKPLCPDNEEFIVFVRKNYILNLRYHLPKTVLDKSWLRPPGILENASDLLRKMCVRNLVQKYCRGITAERKAMMQQKVVTSEIFRGRKDGYTESLNQPFVNSRIDEGDINPKVLQLISHEKIQYGVPVIKYDRKGFKARQRQLILTQKAAYVVELAKIKQKIEYSALKGVSTSNLSDGILVIHVSPEDSKQKGDAVLQCGHVFEAVTKLVMLVKKENIVNVVQGSLQFFISPGKEGTIVFDTGLEEQVYKNKNGQLTVVSVRRKS

SEQ ID NO: 725 - protein, 792 aa, synthetic construct
  REGION 1..792: note = NA17__Homo_sapiens__Q3V5L5
MITVNPDGKIMVRRCLVTLRPFRLFVLGIGFFTLCFLMTSLGGQFSARRLGDSPFTIRTEVMGGPESRGVLRKMSDLLELMVKRMDALARLENSSELHRAGGDLHFPADRMPPGAGLMERIQAIAQNVSDIAVKVDQILRHSLLLHSKVSEGRRDQCEAPSDPKFPDCSGKVEWMRARWTSDPCYAFFGVDGTECSFLIYLSEVEWFCPPLPWRNQTAAQRAPKPLPKVQAVFRSNLSHLLDLMGSGKESLIFMKKRTKRLTAQWALAAQRLAQKLGATQRDQKQILVHIGFLTEESGDVFSPRVLKGGPLGEMVQWADILTALYVLGHGLRVTVSLKELQSNLGVPPGRGSCPLTMPLPFDLIYTDYHGLQQMKRHMGLSFKKYRCRIRVIDTFGTEPAYNHEEYATLHGYRTNWGYWNLNPKQFMTMFPHTPDNSFMGFVSEELNETEKRLIKGGKASNMAVVYGKEASIWKLQGKEKFLGILNKYMEIHGTVYYESQRPPEVPAFVKNHGLLPQPEFQQLLRKAKLFIGFGFPYEGPAPLEAIANGCIFLQSRFSPPHSSLNHEFFRGKPTSREVFSQHPYAENFIGKPHVWTVDYNNSEEFEAAIKAIMRTQVDPYLPYEYTCEGMLERIHAYIQHQDFCRAPDPALPEAHAPQSPFVLAPNATHLEWARNTSLAPGAWPPAHALRAWLAVPGRACTDTCLDHGLICEPSFFPFLNSQDAFLKLQVPCDSTESEMNHLYPAFAQPGQECYLQKEPLLFSCAGSNTKYRRLCPCRDFRKGQVALCQGCL

SEQ ID NO: 726 - protein, 11 aa, synthetic construct
  REGION 1..11: note = NA88-A__Homo_sapiens__10790436
MTQGQHFLQKV

SEQ ID NO: 727 - protein, 736 aa, synthetic construct
  REGION 1..736: note = Neo-PAP__Homo_sapiens__Q9BWT3
MKEMSANTVLDSQRQQKHYGITSPISLASPKEIDHIYTQKLIDAMKPFGVFEDEEELNHRLVVLGKLNNLVKEWISDVSESKNLPPSVVATVGGKIFTFGSYRLGVHTKGADIDALCVAPRHVERSDFFQSFFEKLKHQDGIRNLRAVEDAFVPVIKFEFDGIEIDLVFARLAIQTISDNLDLRDDSRLRSLDIRCIRSLNGCRVTDEILHLVPNKETFRLTLRAVKLWAKRRGIYSNMLGFLGGVSWAMLVARTCQLYPNAAASTLVHKFFLVFSKWEWPNPVLLKQPEESNLNLPVWDPRVNPSDRYHLMPIITPAYPQQNSTYNVSTSTRTVMVEEFKQGLAVTDEILQGKSDWSKLLEPPNFFQKYRHYIVLTASASTEENHLEWVGLVESKIRVLVGNLERNEFITLAHVNPQSFPGNKEHHKDNNYVSMWFLGIIFRRVENAESVNIDLTYDIQSFTDTVYRQANNINMLKEGMKIEATHVKKKQLHHYLPAEILQKKKKQSLSDVNRSSGGLQSKRLSLDSSCLDSSRDTDNGTPFNSPASKSDSPSVGETERNSAEPAAVIVEKPLSVPPAQGLSIPVIGAKVDSTVKTVSPPTVCTIPTVVGRNVIPRITTPHNPAQGQPHLNGMSNITKTVTPKRSHSPSIDGTPKRLKDVEKFIRLESTFKDPRTAEERKRKSVDAIGGESMPIPTIDTSRKKRLPSKELPDSSSPVPANNIRVIKNSIRLTLNR

SEQ ID NO: 728 - protein, 458 aa, synthetic construct
  REGION 1..458: note = NFYC/m__Homo_sapiens__Q13952
MSTEGGFGGTSSSDAQQSLQSFWPRVMEEIRNLTVKDFRVQELPLARIKKIMKLDEDVKMISAEAPVLFAKAAQIFITELTLRAWIHTEDNKRRTLQRNDIAMAITKFDQFDFLIDIVPRDELKPPKRQEEVRQSVTPAEPVQYYFTLAQQPTAVQVQGQQQGQQTTSSTTTIQPGQIIIAQPQQGQTTPVTMQVGEGQQVQIVQAQPQGQAQQAQSGTGQTMQVMQQIITNTGEIQQIPVQLNAGQLQYIRLAQPVSGTQVVQGQIQTLATNAQQGQRNASQGKPRRCLKETLQITQTEVQQGQQQFSQFTDGQRNSVQQARVSELTGEAEPREVKATGNSTPCTSSLPTTHPPSHRAGASCVCCSQPQQSSTSPPPSDALQWVVVEVSGTPNQLETHRELHAPLPGMTSLSPLHPSQQLYQIQQVTMPAGQDLAQPMFIQSANQPSDGQAPQVTGD

SEQ ID NO: 729 - protein, 933 aa, synthetic construct
  REGION 1..933: note = NGEP__Homo_sapiens__Q6IWH7
MRMAATAWAGLQGPPLPTLCPAVRTGLYCRDQAHAERWAMTSETSSGSHCARSRMLRRRAQEEDSTVLIDVSPPEAEKRGSYGSTAHASEPGGQQAAACRAGSPAKPRIADFVLVWEEDLKLDRQQDSAARDRTDMHRTWRETFLDNLRAAGLCVDQQDVQDGNTTVHYALLSASWAVLCYYAEDLRLKLPLQELPNQASNWSAGLLAWLGIPNVLLEVVPDVPPEYYSCRFRVNKLPRFLGSDNQDTFFTSTKRHQILFEILAKTPYGHEKKNLLGIHQLLAEGVLSAAFPLHDGPFKTPPEGPQAPRLNQRQVLFQHWARWGKWNKYQPLDHVRRYFGEKVALYFAWLGFYTGWLLPAAVVGTLVFLVGCFLVFSDIPTQELCGSKDSFEMCPLCLDCPFWLLSSACALAQAGRLFDHGGTVFFSLFMALWAVLLLEYWKRKSATLAYRWDCSDYEDTEERPRPQFAASAPMTAPNPITGEDEPYFPERSRARRMLAGSVVIVVMVAVVVMCLVSIILYRAIMAIVVSRSGNTLLAAWASRIASLTGSVVNLVFILILSKIYVSLAHVLTRWEMHRTQTKFEDAFTLKVFIFQFVNFYSSPVYIAFFKGRFVGYPGNYHTLFGVRNEECAAGGCLIELAQELLVIMVGKQVINNMQEVLIPKLKGWWQKFRLRSKKRKAGASAGASQGPWEDDYELVPCEGLFDEYLEMVLQFGFVTIFVAACPLAPLFALLNNWVEIRLDARKFVCEYRRPVAERAQDIGIWFHILAGLTHLAVISNAFLLAFSSDFLPRAYYRWTRAHDLRGFLNFTLARAPSSFAAAHNRTCRYRAFRDDDGHYSQTYWNLLAIRLAFVIVFEHVVFSVGRLLDLLVPDIPESVEIKVKREYYLAKQALAENEVLFGTNGTKDEQPEGSELSSHWTPFTVPKASQLQQ

SEQ ID NO: 730 - protein, 294 aa, synthetic construct
  REGION 1..294: note = NPM__Homo_sapiens__P06748
MEDSMDMDMSPLRPQNYLFGCELKADKDYHFKVDNDENEHQLSLRTVSLGAGAKDELHIVEAEAMNYEGSPIKVTLATLKMSVQPTVSLGGFEITPPVVLRLKCGSGPVHISGQHLVAVEEDAESEDEEEEDVKLLSISGKRSAPGGGSKVPQKKVKLAADEDDDDDDEEDDDEDDDDDDFDDEEAEEKAPVKKSIRDTPAKNAQKSNQNGKDSKPSSTPRSKGQESFKKQEKTPKTPKGPSSVEDIKAKMQASIEKGGSLPKVEAKFINYVKNCFRMTDQEAIQDLWQWRKSL

SEQ ID NO: 731 - protein, 1304 aa, synthetic construct
  REGION 1..1304: note = NRCAM__Homo_sapiens__Q92823
MQLKIMPKKKRLSAGRVPLILFLCQMISALEVPLDPKLLEDLVQPPTITQQSPKDYIIDPRENIVIQCEAKGKPPPSFSWTRNGTHFDIDKDPLVTMKPGTGTLIINIMSEGKAETYEGVYQCTARNERGAAVSNNIVVRPSRSPLWTKEKLEPITLQSGQSLVLPCRPPIGLPPPIIFWMDNSFQRLPQSERVSQGLNGDLYFSNVLPEDTREDYICYARFNHTQTIQQKQPISVKVISVDELNDTIAANLSDTEFYGAKSSRERPPTFLTPEGNASNKEELRGNVLSLECIAEGLPTPIIYWAKEDGMLPKNRTVYKNFEKTLQIIHVSEADSGNYQCIAKNALGAIHHTISVRVKAAPYWITAPQNLVLSPGEDGTLICRANGNPKPRISWLTNGVPIEIAPDDPSRKIDGDTIIFSNVQERSSAVYQCNASNEYGYLLANAFVNVLAEPPRILTPANTLYQVIANRPALLDCAFFGSPLPTIEWFKGAKGSALHEDIYVLHENGTLEIPVAQKDSTGTYTCVARNKLGMAKNEVHLEIKDPTWIVKQPEYAVVQRGSMVSFECKVKHDHTLSLTVLWLKDNRELPSDERFTVDKDHLVVADVSDDDSGTYTCVANTTLDSVSASAVLSVVAPTPTPAPVYDVPNPPFDLELTDQLDKSVQLSWTPGDDNNSPITKFIIEYEDAMHKPGLWHHQTEVSGTQTTAQLKLSPYVNYSFRVMAVNSIGKSLPSEASEQYLTKASEPDKNPTAVEGLGSEPDNLVITWKPLNGFESNGPGLQYKVSWRQKDGDDEWTSVVVANVSKYIVSGTPTFVPYLIKVQALNDMGFAPEPAVVMGHSGEDLPMVAPGNVRVNVVNSTLAEVHWDPVPLKSIRGHLQGYRIYYWKTQSSSKRNRRHIEKKILTFQGSKTHGMLPGLEPFSHYTLNVRVVNGKGEGPASPDRVFNTPEGVPSAPSSLKIVNPTLDSLTLEWDPPSHPNGILTEYTLKYQPINSTHELGPLVDLKIPANKTRWTLKNLNFSTRYKFYFYAQTSAGSGSQITEEAVTTVDEAGILPPDVGAGKVQAVNPRISNLTAAAAETYANISWEYEGPEHVNFYVEYGVAGSKEEWRKEIVNGSRSFFGLKGLMPGTAYKVRVGAVGDSGFVSSEDVFETGPAMASRQVDIATQGWFIGLMCAVALLILILLIVCFIRRNKGGKYPVKEKEDAHADPEIQPMKEDDGTFGEYSDAEDHKPLKKGSRTPSDRTVKKEDSDDSLVDYGEGVNGQFNEDGSFIGQYSGKKEKEPAEGNESSEAPSPVNAMNSFV

SEQ ID NO: 732 - protein, 434 aa, synthetic construct
  REGION 1..434: note = NSE__Homo_sapiens__P09104
MSIEKIWAREILDSRGNPTVEVDLYTAKGLFRAAVPSGASTGIYEALELRDGDKQRYLGKGVLKAVDHINSTIAPALISSGLSVVEQEKLDNLMLELDGTENKSKFGANAILGVSLAVCKAGAAERELPLYRHIAQLAGNSDLILPVPAFNVINGGSHAGNKLAMQEFMILPVGAESFRDAMRLGAEVYHTLKGVIKDKYGKDATNVGDEGGFAPNILENSEALELVKEAIDKAGYTEKIVIGMDVAASEFYRDGKYDLDFKSPTDPSRYITGDQLGALYQDFVRDYPVVSIEDPFDQDDWAAWSKFTANVGIQIVGDDLTVTNPKRIERAVEEKACNCLLLKVNQIGSVTEAIQACKLAQENGWGVMVSHRSGETEDTFIADLVVGLCTGQIKTGAPCRSERLAKYNQLMRIEEELGDEARFAGHNFRNPSVL

SEQ ID NO: 733 - protein, 464 aa, synthetic construct
  REGION 1..464: note = NUF2__Homo_sapiens__Q9BZD4
METLSFPRYNVAEIVIHIRNKILTGADGKNLTKNDLYPNPKPEVLHMIYMRALQIVYGIRLEHFYMMPVNSEVMYPHLMEGFLPFSNLVTHLDSFLPICRVNDFETADILCPKAKRTSRFLSGIINFIHFREACRETYMEFLWQYKSSADKMQQLNAAHQEALMKLERLDSVPVEEQEEFKQLSDGIQELQQSLNQDFHQKTIVLQEGNSQKKSNISEKTKRLNELKLSVVSLKEIQESLKTKIVDSPEKLKNYKEKMKDTVQKLKNARQEVVEKYEIYGDSVDCLPSCQLEVQLYQKKIQDLSDNREKLASILKESLNLEDQIESDESELKKLKTEENSFKRLMIVKKEKLATAQFKINKKHEDVKQYKRTVIEDCNKVQEKRGAVYERVTTINQEIQKIKLGIQQLKDAAEREKLKSQEIFLNLKTALEKYHDGIEKAAEDSYAKIDEKTAELKRKMFKMST

SEQ ID NO: 734 - protein, 180 aa, synthetic construct; identical to SEQ ID NO: 328
  REGION 1..180: note = NY-ESO-1__Homo_sapiens__P78358

SEQ ID NO: 735 - protein, 404 aa, synthetic construct
  REGION 1..404: note = OA1__Homo_sapiens__P51810
MASPRLGTFCCPTRDAATQLVLSFQPRAFHALCLGSGGLRLALGLLQLLPGRRPAGPGSPATSPPASVRILRAAAACDLLGCLGMVIRSTVWLGFPNFVDSVSDMNHTEIWPAAFCVGSAMWIQLLYSACFWWLFCYAVDAYLVIRRSAGLSTILLYHIMAWGLATLLCVEGAAMLYYPSVSRCERGLDHAIPHYVTMYLPLLLVLVANPILFQKTVTAVASLLKGRQGIYTENERRMGAVIKIRFFKIMLVLIICWLSNIINESLLFYLEMQTDINGGSLKPVRTAAKTTWFIMGILNPAQGFLLSLAFYGWTGCSLGFQSPRKEIQWESLTTSAAEGAHPSPLMPHENPASGKVSQVGGQTSDEALSMLSEGSDASTIEIHTASESCNKNEGDPALPTHGDL

SEQ ID NO: 736 - protein, 1046 aa, synthetic construct
  REGION 1..1046: note = OGT__Homo_sapiens__O15294
MASSVGNVADSTEPTKRMLSFQGLAELAHREYQAGDFEAAERHCMQLWRQEPDNTGVLLLLSSIHFQCRRLDRSAHFSTLAIKQNPLLAEAYSNLGNVYKERGQLQEAIEHYRHALRLKPDFIDGYINLAAALVAAGDMEGAVQAYVSALQYNPDLYCVRSDLGNLLKALGRLEEAKACYLKAIETQPNFAVAWSNLGCVFNAQGEIWLAIHHFEKAVTLDPNFLDAYINLGNVLKEARIFDRAVAAYLRALSLSPNHAVVHGNLACVYYEQGLIDLAIDTYRRAIELQPHFPDAYCNLANALKEKGSVAEAEDCYNTALRLCPTHADSLNNLANIKREQGNIEEAVRLYRKALEVFPEFAAAHSNLASVLQQQGKLQEALMHYKEAIRISPTFADAYSNMGNTLKEMQDVQGALQCYTRAIQINPAFADAHSNLASIHKDSGNIPEAIASYRTALKLKPDFPDAYCNLAHCLQIVCDWTDYDERMKKLVSIVADQLEKNRLPSVHPHHSMLYPLSHGFRKAIAERHGNLCLDKINVLHKPPYEHPKDLKLSDGRLRVGYVSSDFGNHPTSHLMQSIPGMHNPDKFEVFCYALSPDDGTNFRVKVMAEANHFIDLSQIPCNGKAADRIHQDGIHILVNMNGYTKGARNELFALRPAPIQAMWLGYPGTSGALFMDYIITDQETSPAEVAEQYSEKLAYMPHTFFIGDHANMFPHLKKKAVIDFKSNGHIYDNRIVLNGIDLKAFLDSLPDVKIVKMKCPDGGDNADSSNTALNMPVIPMNTIAEAVIEMINRGQIQITINGFSISNGLATTQINNKAATGEEVPRTIIVTTRSQYGLPEDAIVYCNFNQLYKIDPSTLQMWANILKRVPNSVLWLLRFPAVGEPNIQQYAQNMGLPQNRIIFSPVAPKEEHVRRGQLADVCLDTPLCNGHTTGMDVLWAGTPMVTMPGETLASRVAASQLTCLGCLELIAKNRQEYEDIAVKLGTDLEYLKKVRGKVWKQRISSPLFNTKQYTMELERLYLQMWEHYAAGNKPDHMIKPVEVTESA

SEQ ID NO: 737 - protein, 146 aa, synthetic construct [sequence omitted]

SEQ ID NO: 738 - protein, 406 aa, synthetic construct
  REGION 1..406: note = OS-9__Homo_sapiens__B4E321
MAAETLLSSLLGLLLLGLLLPASLTGGVGSLNLEELSEMRYGIEILPLPVMGGQSQSSDVVIVSSKYKQRYECRLPAGAIHFQREREEETPAYQGPGIPELLSPMRDAPCLLKTKDWWTYEFCYGRHIQQYHMEDSASGAPNDFQNNVQVKVIRSPADLIRFIEELKGGTKKGKPNIGQEQPVDDAAEVPQREPEKERGDPERQREMEEEEDEDEDEDEDEDERQLLGEFEKELEGILLPSDRDRLRSEVKAGMERELENIIQETEKELDPDGLKKESERDRAMLALTSTLNKLIKRLEEKQSPELVKKHKKKRVVPKKPPPSPQPTGKIEIKIVRPWAEGTEEGARWLTDEDTRNLKEIFFNILVPGAEEAQKERQRQKELESNYRRVWGSPGGEGTGDLDEFDF

SEQ ID NO: 739 - protein, 740 aa, synthetic construct
  REGION 1..740: note = OS-9__Homo_sapiens__B7Z8E7
MAVETLLSSLLGLLLLGLLLPASLTGGVGSLNLEELSEMRYGIEILPLPVMGGQSQSSDVVIVSSKYKQRYECRLPAGAIHFQREREEETPAYQGPGIPELLSPMRDAPCLLKTKDWWTYEFCYGRHIQQYHMEDSEIKGEVLYLGYYQSAFDWDDETAKASKQHRLKRYHSQTYGNGSKCDLNGRPREAEVRFLCDEGAGISGDYIDRVDEPLSCSYVLTIRTPRLCPHPLLRPPPSAAPQAILCHPSLQPEEYMAYVQRQADSKQYGDKIIEELQDLGPQVWSETKSGVAPQKMAGRTLFHLFREIHFHFFPSPDLTVLTDWWGGGGVEKYHGPSSLGDRGGEGTPSYLLPSVSPLLSDQSLPVLCTLGASPTKDDSKDSDFWKMLNEPEDQAPGGEEVPAEEQDPSPEAADSASGAPNDFQNNVQVKVIRSPADLIRFIEELKGGTKKGKPNIGQEQPVDDAAEVPQREPEKERGDPERQREMEEEEDEDEDEDEDEDERQLLGEFEKELEGILLPSDRDRLRSEVKAGMERELENIIQETEKELDPDGLKKESERDRAMLALTSTLNKLIKRLEEKQSPELVKKHKKKRVVPKKPPPSPQPTEEDPEHRVRVRVTKLRLGGPNQDLTVLEMKRENPQLKQIEGLVKELLEREGLTAAGKIEIKIVRPWAEGTEEGARWLTDEDTRNLKEIFFNILVPGAEEAQKERQRQKELESNYRRVWGSPGGEGTGDLDEFDF

SEQ ID NO: 740 - protein, 667 aa, synthetic construct
  REGION 1..667: note = OS-9__Homo_sapiens__Q13438
MAAETLLSSLLGLLLLGLLLPASLTGGVGSLNLEELSEMRYGIEILPLPVMGGQSQSSDVVIVSSKYKQRYECRLPAGAIHFQREREEETPAYQGPGIPELLSPMRDAPCLLKTKDWWTYEFCYGRHIQQYHMEDSEIKGEVLYLGYYQSAFDWDDETAKASKQHRLKRYHSQTYGNGSKCDLNGRPREAEVRFLCDEGAGISGDYIDRVDEPLSCSYVLTIRTPRLCPHPLLRPPPSAAPQAILCHPSLQPEEYMAYVQRQADSKQYGDKIIEELQDLGPQVWSETKSGVAPQKMAGASPTKDDSKDSDFWKMLNEPEDQAPGGEEVPAEEQDPSPEAADSASGAPNDFQNNVQVKVIRSPADLIRFIEELKGGTKKGKPNIGQEQPVDDAAEVPQREPEKERGDPERQREMEEEEDEDEDEDEDEDERQLLGEFEKELEGILLPSDRDRLRSEVKAGMERELENIIQETEKELDPDGLKKESERDRAMLALTSTLNKLIKRLEEKQSPELVKKHKKKRVVPKKPPPSPQPTEEDPEHRVRVRVTKLRLGGPNQDLTVLEMKRENPQLKQIEGLVKELLEREGLTAAGKIEIKIVRPWAEGTEEGARWLTDEDTRNLKEIFFNILVPGAEEAQKERQRQKELESNYRRVWGSPGGEGTGDLDEFDF

SEQ ID NO: 741 - protein, 100 aa, synthetic construct
  REGION 1..100: note = osteocalcin__Homo_sapiens__P02818
MRALTLLALLALAALCIAGQAGAKPSGAESSKGAAFVSKQEGSEVVKRPRRYLYQWLGAPVPYPDPLEPRREVCELNPDCDELADHIGFQEAYRRFYGPV

SEQ ID NO: 742 - protein, 314 aa, synthetic construct
  REGION 1..314: note = osteopontin__Homo_sapiens__A0A024RDE2
MRIAVICFCLLGITCAIPVKQADSGSSEEKQLYNKYPDAVATWLNPDPSQKQNLLAPQNAVSSEETNDFKQETLPSKSNESHDHMDDMDDEDDDDHVDSQDSIDSNDSDDVDDTDDSHQSDESHHSDESDELVTDFPTDLPATEVFTPVVPTVDTYDGRGDSVVYGLRSKSKKFRRPDIQYPDATDEDITSHMESEELNGAYKAIPVAQDLNAPSDWDSRGKDSYETSQLDDQSAETHSHKQSRLYKRKANDESNEHSDVIDSQELSKVSREFHSHEFHSHEDMLVVDPKSKEEDKHLKFRISHELDSASSEVN

SEQ ID NO: 743 - protein, 300 aa, synthetic construct
  REGION 1..300: note = osteopontin__Homo_sapiens__A0A024RDE6
MRIAVICFCLLGITCAIPVKQADSGSSEEKQLYNKYPDAVATWLNPDPSQKQNLLAPQTLPSKSNESHDHMDDMDDEDDDDHVDSQDSIDSNDSDDVDDTDDSHQSDESHHSDESDELVTDFPTDLPATEVFTPVVPTVDTYDGRGDSVVYGLRSKSKKFRRPDIQYPDATDEDITSHMESEELNGAYKAIPVAQDLNAPSDWDSRGKDSYETSQLDDQSAETHSHKQSRLYKRKANDESNEHSDVIDSQELSKVSREFHSHEFHSHEDMLVVDPKSKEEDKHLKFRISHELDSASSEVN

SEQ ID NO: 744 - protein, 287 aa, synthetic construct
  REGION 1..287: note = osteopontin__Homo_sapiens__A0A024RDJ0
MRIAVICFCLLGITCAIPVKQADSGSSEEKQNAVSSEETNDFKQETLPSKSNESHDHMDDMDDEDDDDHVDSQDSIDSNDSDDVDDTDDSHQSDESHHSDESDELVTDFPTDLPATEVFTPVVPTVDTYDGRGDSVVYGLRSKSKKFRRPDIQYPDATDEDITSHMESEELNGAYKAIPVAQDLNAPSDWDSRGKDSYETSQLDDQSAETHSHKQSRLYKRKANDESNEHSDVIDSQELSKVSREFHSHEFHSHEDMLVVDPKSKEEDKHLKFRISHELDSASSEVN

SEQ ID NO: 745 - protein, 327 aa, synthetic construct
  REGION 1..327: note = osteopontin__Homo_sapiens__B7Z351
MGIVPRSLDKKAHRVQFQLNRIKAKIELPWGSLQLDCLMKTLKELYNKYPDAVATWLNPDPSQKQNLLAPQNAVSSEETNDFKQETLPSKSNESHDHMDDMDDEDDDDHVDSQDSIDSNDSDDVDDTDDSHQSDESHHSDESDELVTDFPTDLPATEVFTPVVPTVDTYDGRGDSVVYGLRSKSKKFRRPDIQYPDATDEDITSHMESEELNGAYKAIPVAQDLNAPSDWDSRGKDSYETSQLDDQSAETHSHKQSRLYKRKANDESNEHSDVIDSQELSKVSREFHSHEFHSHEDMLVVDPKSKEEDKHLKFRISHELDSASSEVN

SEQ ID NO: 746 - protein, 292 aa, synthetic construct
  REGION 1..292: note = osteopontin__Homo_sapiens__F2YQ21
MRIAVICFCLLGITCAIPVKQADSGSSEEKQLYNKYPDAVATWLNPDPSQKQNLLAPQNAVSSEETNDFKQETLPSKSNESHDHMDDMDDEDDDSHQSDESHHSDESDELVTDFPTDLPATEVFTPVVPTVDTYDGRGDSVVYGLRSKSKKFRRPDIQYPDATDEDITSHMESEELNGAYKAIPVAQDLNAPSDWDSRGKDSYETSQLDDQSAETHSHKQSRLYKRKANDESNEHSDVIDSQELSKVSREFHSHEFHSHEDMLVVDPKSKEEDKHLKFRISHELDSASSEVN

SEQ ID NO: 747 - protein, 314 aa, synthetic construct; identical to SEQ ID NO: 742
  REGION 1..314: note = osteopontin__Homo_sapiens__P10451

SEQ ID NO: 748 - protein, 393 aa, synthetic construct [sequence omitted]

SEQ ID NO: 749 - protein, 102 aa, synthetic construct
  REGION 1..102: note = PAGE-4__Homo_sapiens__O60829
MSARVRSRSRGRGDGQEAPDVVAFVAPGESQQEEPPTDNQDIEPGQEREGTPPIEERKVEGDCQEMDLEKTRSERGDGSDVKEKTPPNPKHAKTKEAGDGQP

SEQ ID NO: 750 - protein, 402 aa, synthetic construct [sequence omitted]

SEQ ID NO: 751 - protein, 415 aa, synthetic construct
  REGION 1..415: note = PAI-2__Homo_sapiens__P05120
MEDLCVANTLFALNLFKHLAKASPTQNLFLSPWSISSTMAMVYMGSRGSTEDQMAKVLQFNEVGANAVTPMTPENFTSCGFMQQIQKGSYPDAILQAQAADKIHSSFRSLSSAINASTGNYLLESVNKLFGEKSASFREEYIRLCQKYYSSEPQAVDFLECAEEARKKINSWVKTQTKGKIPNLLPEGSVDGDTRMVLVNAVYFKGKWKTPFEKKLNGLYPFRVNSAQRTPVQMMYLREKLNIGYIEDLKAQILELPYAGDVSMFLLLPDEIADVSTGLELLESEITYDKLNKWTSKDKMAEDEVEVYIPQFKLEEHYELRSILRSMGMEDAFNKGRANFSGMSERNDLFLSEVFHQAMVDVNEEGTEAAAGTGGVMTGRTGHGGPQFVADHPFLFLIMHKITNCILFFGRFSSP

SEQ ID NO: 752 - protein, 175 aa, synthetic construct
  REGION 1..175: note = PAP__Homo_sapiens__Q06141
MLPPMALPSVSWMLLSCLMLLSQVQGEEPQRELPSARIRCPKGSKAYGSHCYALFLSPKSWTDADLACQKRPSGNLVSVLSGAEGSFVSSLVKSIGNSYSYVWIGLHDPTQGTEPNGEGWEWSSSDVMNYFAWERNPSTISSPGHCASLSRSTAFLRWKDYNCNVRLPYVCKFTD

SEQ ID NO: 753 - protein, 175 aa, synthetic construct; identical to SEQ ID NO: 752
  REGION 1..175: note = PAP__Homo_sapiens__Q53S56

SEQ ID NO: 754 - protein, 126 aa, synthetic construct
  REGION 1..126: note = PATE__Homo_sapiens__Q8WXA2
MDKSLLLELPILLCCFRALSGSLSMRNDAVNEIVAVKNNFPVIEIVQCRMCHLQFPGEKCSRGRGICTATTEEACMVGRMFKRDGNPWLTFMGCLKNCADVKGIRWSVYLVNFRCCRSHDLCNEDL

SEQ ID NO: 755 - protein, 479 aa, synthetic construct
  REGION 1..479: note = PAX3__Homo_sapiens__P23760
MTTLAGAVPRMMRPGPGQNYPRSGFPLEVSTPLGQGRVNQLGGVFINGRPLPNHIRHKIVEMAHHGIRPCVISRQLRVSHGCVSKILCRYQETGSIRPGAIGGSKPKQVTTPDVEKKIEEYKRENPGMFSWEIRDKLLKDAVCDRNTVPSVSSISRILRSKFGKGEEEEADLERKEAEESEKKAKHSIDGILSERASAPQSDEGSDIDSEPDLPLKRKQRRSRTTFTAEQLEELERAFERTHYPDIYTREELAQRAKLTEARVQVWFSNRRARWRKQAGANQLMAFNHLIPGGFPPTAMPTLPTYQLSETSYQPTSIPQAVSDPSSTVHRPQPLPPSTVHQSTIPSNPDSSSAYCLPSTRHGFSSYTDSFVPPSGPSNPMNPTIGNGLSPQVMGLLTNHGGVPHQPQTDYALSPLTGGLEPTTTVSASCSQRLDHMKSLDSLPTSQSYCPPTYSTTGYSMDPVTGYQYGQYGQSKPWTF

SEQ ID NO: 756 - protein, 391 aa, synthetic construct
  REGION 1..391: note = PAX5__Homo_sapiens__Q02548
MDLEKNYPTPRTSRTGHGGVNQLGGVFVNGRPLPDVVRQRIVELAHQGVRPCDISRQLRVSHGCVSKILGRYYETGSIKPGVIGGSKPKVATPKVVEKIAEYKRQNPTMFAWEIRDRLLAERVCDNDTVPSVSSINRIIRTKVQQPPNQPVPASSHSIVSTGSVTQVSSVSTDSAGSSYSISGILGITSPSADTNKRKRDEGIQESPVPNGHSLPGRDFLRKQMRGDLFTQQQLEVLDRVFERQHYSDIFTTTEPIKPEQTTEYSAMASLAGGLDDMKANLASPTPADIGSSVPGPQSYPIVTGRDLASTTLPGYPPHVPPAGQGSYSAPTLTGMVPGSEFSGSPYSHPQYSSYNDSWRFPNPGLLGSPYYYSAAARGAAPPAAATAYDRH

SEQ ID NO: 757 - protein, 290 aa, synthetic construct
  REGION 1..290: note = PD1L1__Homo_sapiens__Q9NZQ7
MRIFAVFIFMTYWHLLNAFTVTVPKDLYVVEYGSNMTIECKFPVEKQLDLAALIVYWEMEDKNIIQFVHGEEDLKVQHSSYRQRARLLKDQLSLGNAALQITDVKLQDAGVYRCMISYGGADYKRITVKVNAPYNKINQRILVVDPVTSEHELTCQAEGYPKAEVIWTSSDHQVLSGKTTTTNSKREEKLFNVTSTLRINTTTNEIFYCTFRRLDPEENHTAELVIPELPLAHPPNERTHLVILGAILLCLGVALTFIFRLRKGRMMDVKKCGIQDTNSKKQSDTHLEET

SEQ ID NO: 758 - protein, 288 aa, synthetic construct
  REGION 1..288: note = PDCD1__Homo_sapiens__Q15116
MQIPQAPWPVVWAVLQLGWRPGWFLDSPDRPWNPPTFSPALLVVTEGDNATFTCSFSNTSESFVLNWYRMSPSNQTDKLAAFPEDRSQPGQDCRFRVTQLPNGRDFHMSVVRARRNDSGTYLCGAISLAPKAQIKESLRAELRVTERRAEVPTAHPSPSPRPAGQFQTLVVGVVGGLLGSLVLLVWVLAVICSRAARGTIGARRTGQPLKEDPSAVPVFSVDYGELDFQWREKTPEPPVPCVPEQTEYATIVFPSGMGTSSPARRGSADGPRSAQPLRPEDGHCSWPL

SEQ ID NO: 759 - protein, 335 aa, synthetic construct
  REGION 1..335: note = PDEF__Homo_sapiens__O95238
MGSASPGLSSVSPSHLLLPPDTVSRTGLEKAAAGAVGLERRDWSPSPPATPEQGLSAFYLSYFDMLYPEDSSWAAKAPGASSREEPPEEPEQCPVIDSQAPAGSLDLVPGGLTLEEHSLEQVQSMVVGEVLKDIETACKLLNITADPMDWSPSNVQKWLLWTEHQYRLPPMGKAFQELAGKELCAMSEEQFRQRSPLGGDVLHAHLDIWKSAAWMKERTSPGAIHYCASTSEESWTDSEVDSSCSGQPIHLWQFLKELLLKPHSYGRFIRWLNKEKGIFKIEDSAQVARLWGIRKNRPAMNYDKLSRSIRQYYKKGIIRKPDISQRLVYQFVHPI

SEQ ID NO: 760 - protein, 738 aa, synthetic construct
  REGION 1..738: note = PECA1__Homo_sapiens__P16284
MQPRWAQGATMWLGVLLTLLLCSSLEGQENSFTINSVDMKSLPDWTVQNGKNLTLQCFADVSTTSHVKPQHQMLFYKDDVLFYNISSMKSTESYFIPEVRIYDSGTYKCTVIVNNKEKTTAEYQLLVEGVPSPRVTLDKKEAIQGGIVRVNCSVPEEKAPIHFTIEKLELNEKMVKLKREKNSRDQNFVILEFPVEEQDRVLSFRCQARIISGIHMQTSESTKSELVTVTESFSTPKFHISPTGMIMEGAQLHIKCTIQVTHLAQEFPEIIIQKDKAIVAHNRHGNKAVYSVMAMVEHSGNYTCKVESSRISKVSSIVVNITELFSKPELESSFTHLDQGERLNLSCSIPGAPPANFTIQKEDTIVSQTQDFTKIASKSDSGTYICTAGIDKVVKKSNTVQIVVCEMLSQPRISYDAQFEVIKGQTIEVRCESISGTLPISYQLLKTSKVLENSTKNSNDPAVFKDNPTEDVEYQCVADNCHSHAKMLSEVLRVKVIAPVDEVQISILSSKVVESGEDIVLQCAVNEGSGPITYKFYREKEGKPFYQMTSNATQAFWTKQKASKEQEGEYYCTAFNRANHASSVPRSKILTVRVILAPWKKGLIAVVIIGVIIALLIIAAKCYFLRKAKAKQMPVEMSRPAVPLLNSNNEKMSDPNMEANSHYGHNDDVRNHAMKPINDNKEPLNSDVQYTEVQVSSAESHKDLGKKDTETVYSEVRKAVPDAVESRYSRTEGSLDGT

SEQ ID NO: 761 - protein, 911 aa, synthetic construct
  REGION 1..911: note = PGCB__Homo_sapiens__Q96GW7
MAQLFLPLLAALVLAQAPAALADVLEGDSSEDRAFRVRIAGDAPLQGVLGGALTIPCHVHYLRPPPSRRAVLGSPRVKWTFLSRGREAEVLVARGVRVKVNEAYRFRVALPAYPASLTDVSLALSELRPNDSGIYRCEVQHGIDDSSDAVEVKVKGVVFLYREGSARYAFSFSGAQEACARIGAHIATPEQLYAAYLGGYEQCDAGWLSDQTVRYPIQTPREACYGDMDGFPGVRNYGVVDPDDLYDVYCYAEDLNGELFLGDPPEKLTLEEARAYCQERGAEIATTGQLYAAWDGGLDHCSPGWLADGSVRYPIVTPSQRCGGGLPGVKTLFLFPNQTGFPNKHSRFNVYCFRDSAQPSAIPEASNPASNPASDGLEAIVTVTETLEELQLPQEATESESRGAIYSIPIMEDGGGGSSTPEDPAEAPRTLLEFETQSMVPPTGFSEEEGKALEEEEKYEDEEEKEEEEEEEEVEDEALWAWPSELSSPGPEASLPTEPAAQEESLSQAPARAVLQPGASPLPDGESEASRPPRVHGPPTETLPTPRERNLASPSPSTLVEAREVGEATGGPELSGVPRGESEETGSSEGAPSLLPATRAPEGTRELEAPSEDNSGRTAPAGTSVQAQPVLPTDSASRGGVAVVPASGDCVPSPCHNGGTCLEEEEGVRCLCLPGYGGDLCDVGLRFCNPGWDAFQGACYKHFSTRRSWEEAETQCRMYGAHLASISTPEEQDFINNRYREYQWIGLNDRTIEGDFLWSDGVPLLYENWNPGQPDSYFLSGENCVVMVWHDQGQWSDVPCNYHLSYTCKMGLVSCGPPPELPLAQVFGRPRLRYEVDTVLRYRCREGLAQRNLPLIRCQENGRWEAPQISCVPRRPARALHPEEDPEGRQGRLLGRWKALLIPPSSPMPGP

SEQ ID NO: 762 - protein, 1106 aa, synthetic construct
  REGION 1..1106: note = PGFRB__Homo_sapiens__P09619
MRLPGAMPALALKGELLLLSLLLLLEPQISQGLVVTPPGPELVLNVSSTFVLTCSGSAPVVWERMSQEPPQEMAKAQDGTFSSVLTLTNLTGLDTGEYFCTHNDSRGLETDERKRLYIFVPDPTVGFLPNDAEELFIFLTEITEITIPCRVTDPQLVVTLHEKKGDVALPVPYDHQRGFSGIFEDRSYICKTTIGDREVDSDAYYVYRLQVSSINVSVNAVQTVVRQGENITLMCIVIGNEVVNFEWTYPRKESGRLVEPVTDFLLDMPYHIRSILHIPSAELEDSGTYTCNVTESVNDHQDEKAINITVVESGYVRLLGEVGTLQFAELHRSRTLQVVFEAYPPPTVLWFKDNRTLGDSSAGEIALSTRNVSETRYVSELTLVRVKVAEAGHYTMRAFHEDAEVQLSFQLQINVPVRVLELSESHPDSGEQTVRCRGRGMPQPNIIWSACRDLKRCPRELPPTLLGNSSEEESQLETNVTYWEEEQEFEVVSTLRLQHVDRPLSVRCTLRNAVGQDTQEVIVVPHSLPFKVVVISAILALVVLTIISLIILIMLWQKKPRYEIRWKVIESVSSDGHEYIYVDPMQLPYDSTWELPRDQLVLGRTLGSGAFGQVVEATAHGLSHSQATMKVAVKMLKSTARSSEKQALMSELKIMSHLGPHLNVVNLLGACTKGGPIYIITEYCRYGDLVDYLHRNKHTFLQHHSDKRRPPSAELYSNALPVGLPLPSHVSLTGESDGGYMDMSKDESVDYVPMLDMKGDVKYADIESSNYMAPYDNYVPSAPERTCRATLINESPVLSYMDLVGFSYQVANGMEFLASKNCVHRDLAARNVLICEGKLVKICDFGLARDIMRDSNYISKGSTFLPLKWMAPESIFNSLYTTLSDVWSFGILLWEIFTLGGTPYPELPMNEQFYNAIKRGYRMAQPAHASDEIYEIMQKCWEEKFEIRPPFSQLVLLLERLLGEGYKKKYQQVDEEFLRSDHPAILRSQARLPGFHGLRSPLDTSSVLYTAVQPNEGDNDYIIPLPDPKPEVADEGPLEGSPSLASSTLNEVNTSSTISCDSPLEPQDEPEPEPQLELQVEPEPELEQLPDSGCPAPRAEAEDSFL

SEQ ID NO: 763 - protein, 313 aa, synthetic construct
  REGION 1..313: note = Pim-1_-Kinase__Homo_sapiens__A0A024RD25
MLLSKINSLAHLRAAPCNDLHATKLAPGKEKEPLESQYQVGPLLGSGGFGSVYSGIRVSDNLPVAIKHVEKDRISDWGELPNGTRVPMEVVLLKKVSSGFSGVIRLLDWFERPDSFVLILERPEPVQDLFDFITERGALQEELARSFFWQVLEAVRHCHNCGVLHRDIKDENILIDLNRGELKLIDFGSGALLKDTVYTDFDGTRVYSPPEWIRYHRYHGRSAAVWSLGILLYDMVCGDIPFEHDEEIIRGQVFFRQRVSSECQHLIRWCLALRPSDRPTFEEIQNHPWMQDVLLPQETAEIHLHSLSPGPSK

SEQ ID NO: 764 - protein, 100 aa, synthetic construct
  REGION 1..100: note = Pin-1__Homo_sapiens__O15428
MADEEKLPPGWEKRMSRPSGRGYYFNHITNPSQWERPSGNSSSGGKIWQGEPARVRRSHLLVKPVKAALDLAAGNHPDQGGGPGADQRLHPEDQGRREGL

SEQ ID NO: 765 - protein, 163 aa, synthetic construct
  REGION 1..163: note = Pin-1__Homo_sapiens__Q13526
MADEEKLPPGWEKRMSRSSGRVYYFNHITNASQWERPSGNSSSGGKNGQGEPARVRCSHLLVKHSQSRRPSSWRQEKITRTKEEALELINGYIQKIKSGEEDFESLASQFSDCSSAKARGDLGAFSRGQMQKPFEDASFALRTGEMSGPVFTDSGIHIILRTE

SEQ ID NO: 766 - protein, 45 aa, synthetic construct
  REGION 1..45: note = Pin-1__Homo_sapiens__Q49AR7
MQKPFEDASFALRTGEMSGPVFTDSGIHIILRTECWRQTRGPNCF

SEQ ID NO: 767 - protein, 212 aa, synthetic construct
  REGION 1..212: note = PLAC1__Homo_sapiens__Q9HBJ0
MKVFKFIGLMILLTSAFSAGSGQSPMTVLCSIDWFMVTVHPFMLNNDVCVHFHELHLGLGCPPNHVQPHAYQFTYRVTECGIRAKAVSQDMVIYSTEIHYSSKGTPSKFVIPVSCAAPQKSPWLTKPCSMRVASKSRATAQKDEKCYEVFSLSQSSQRPNCDCPPCVFSEEEHTQVPCHQAGAQEAQPLQPSHFLDISEDWSLHTDDMIGSM

SEQ ID NO: 768 - protein, 661 aa, synthetic construct
  REGION 1..661: note = PMEL__Homo_sapiens__P40967
MDLVLKRCLLHLAVIGALLAVGATKVPRNQDWLGVSRQLRTKAWNRQLYPEWTEAQRLDCWRGGQVSLKVSNDGPTLIGANASFSIALNFPGSQKVLPDGQVIWVNNTIINGSQVWGGQPVYPQETDDACIFPDGGPCPSGSWSQKRSFVYVWKTWGQYWQVLGGPVSGLSIGTGRAMLGTHTMEVTVYHRRGSRSYVPLAHSSSAFTITDQVPFSVSVSQLRALDGGNKHFLRNQPLTFALQLHDPSGYLAEADLSYTWDFGDSSGTLISRALVVTHTYLEPGPVTAQVVLQAAIPLTSCGSSPVPGTTDGHRPTAEAPNTTAGQVPTTEVVGTTPGQAPTAEPSGTTSVQVPTTEVISTAPVQMPTAESTGMTPEKVPVSEVMGTTLAEMSTPEATGMTPAEVSIVVLSGTTAAQVTTTEWVETTARELPIPEPEGPDASSIMSTESITGSLGPLLDGTATLRLVKRQVPLDCVLYRYGSFSVTLDIVQGIESAEILQAVPSGEGDAFELTVSCQGGLPKEACMEISSPGCQPPAQRLCQPVLPSPACQLVLHQILKGGSGTYCLNVSLADTNSLAVVSTQLIMPGQEAGLGQVPLIVGILLVLMAVVLASLIYRRRLMKQDFSVPQLPHSSSHWLRLPRIFCSCPIGENSPLLSGQQV

SEQ ID NO: 769 - protein, 882 aa, synthetic construct
  REGION 1..882: note = PML__Homo_sapiens__P29590
MEPAPARSPRPQQDPARPQEPTMPPPETPSEGRQPSPSPSPTERAPASEEEFQFLRCQQCQAEAKCPKLLPCLHTLCSGCLEASGMQCPICQAPWPLGADTPALDNVFFESLQRRLSVYRQIVDAQAVCTRCKESADFWCFECEQLLCAKCFEAHQWFLKHEARPLAELRNQSVREFLDGTRKTNNIFCSNPNHRTPTLTSIYCRGCSKPLCCSCALLDSSHSELKCDISAEIQQRQEELDAMTQALQEQDSAFGAVHAQMHAAVGQLGRARAETEELIRERVRQVVAHVRAQERELLEAVDARYQRDYEEMASRLGRLDAVLQRIRTGSALVQRMKCYASDQEVLDMHGFLRQALCRLRQEEPQSLQAAVRTDGFDEFKVRLQDLSSCITQGKDAAVSKKASPEAASTPRDPIDVDLPEEAERVKAQVQALGLAEAQPMAVVQSVPGAHPVPVYAFSIKGPSYGEDVSNTTTAQKRKCSQTQCPRKVIKMESEEGKEARLARSSPEQPRPSTSKAVSPPHLDGPPSPRSPVIGSEVFLPNSNHVASGAGEAEERVVVISSSEDSDAENSSSRELDDSSSESSDLQLEGPSTLRVLDENLADPQAEDRPLVFFDLKIDNETQKISQLAAVNRESKFRVVIQPEAFFSIYSKAVSLEVGLQHFLSFLSSMRRPILACYKLWGPGLPNFFRALEDINRLWEFQEAISGFLAALPLIRERVPGASSFKLKNLAQTYLARNMSERSAMAAVLAMRDLCRLLEVSPGPQLAQHVYPFSSLQCFASLQPLVQAAVLPRAEARLLALHNVSFMELLSAHRRDRQGGLKKYSRYLSLQTTTLPPAQPAFNLQALGTYFEGLLEGPALARAEGVSTPLAGRGLAERASQQS

SEQ ID NO: 770 - protein, 1075 aa, synthetic construct
  REGION 1..1075: note = POTEF__Homo_sapiens__A5A3E0
MVVEVDSMPAASSVKKPFGLRSKMGKWCCRCFPCCRESGKSNVGTSGDHDDSAMKTLRSKMGKWCRHCFPCCRGSGKSNVGASGDHDDSAMKTLRNKMGKWCCHCFPCCRGSSKSKVGAWGDYDDSAFMEPRYHVRGEDLDKLHRAAWWGKVPRKDLIVMLRDTDVNKQDKQKRTALHLASANGNSEVVKLLLDRRCQLNVLDNKKRTALIKAVQCQEDECALMLLEHGTDPNIPDEYGNTTLHYAIYNEDKLMAKALLLYGADIESKNKHGLTPLLLGVHEQKQQVVKFLIKKKANLNALDRYGRTALILAVCCGSASIVSLLLEQNIDVSSQDLSGQTAREYAVSSHHHVICQLLSDYKEKQMLKISSENSNPEQDLKLTSEEESQRFKGSENSQPEKMSQEPEINKDGDREVEEEMKKHESNNVGLLENLTNGVTAGNGDNGLIPQRKSRTPENQQFPDNESEEYHRICELLSDYKEKQMPKYSSENSNPEQDLKLTSEEESQRLKGSENGQPEKRSQEPEINKDGDRELENFMAIEEMKKHRSTHVGFPENLTNGATAGNGDDGLIPPRKSRTPESQQFPDTENEEYHSDEQNDTQKQFCEEQNTGILHDEILIHEEKQIEVVEKMNSELSLSCKKEKDILHENSTLREEIAMLRLELDTMKHQSQLREKKYLEDIESVKKRNDNLLKALQLNELTMDDDTAVLVIDNGSGMCKAGFAGDDAPRAVFPSIVGRPRQQGMMGGMHQKESYVGKEAQSKRGILTLKYPMEHGIITNWDDMEKIWHHTFYNELRVAPEEHPVLLTEATLNPKANREKMTQIMFETFNTPAMYVAIQAVLSLYTSGRTTGIVMDSGDGVTHTVPIYEGNALPHATLRLDLAGRELPDYLMKILTEHGYRFTTMAEREIVRDIKEKLCYVALDFEQEMATVASSSSLEKSYELPDGQVITIGNERFRCPEALFQPCFLGMESCGIHETTFNSIMKSDVDIRKDLYTNTVLSGGTTMYPGMAHRMQKEIAALAPSMMKIRIIAPPKRKYSVWVGGSILASLSTFQQMWISKQEYDESGPSIVHRKCL

SEQ ID NO: 771 - protein, 584 aa, synthetic construct
  REGION 1..584: note = POTE__Homo_sapiens__Q86YR6
MVAEVCSMPTASTVKKPFDLRSKMGKWCHHRFPCCRGSGKSNMGTSGDHDDSFMKMLRSKMGKCCRHCFPCCRGSGTSNVGTSGDHENSFMKMLRSKMGKWCCHCFPCCRGSGKSNVGAWGDYDHSAFMEPRYHIRREDLDKLHRAAWWGKVPRKDLIVMLRDTDMNKRDKEKRTALHLASANGNSEVVQLLLDRRCQLNVLDNKKRTALIKAIQCQEDECVLMLLEHGADRNIPDEYGNTALHYAIYNEDKLMAKALLLYGADIESKNKCGLTPLLLGVHEQKQQVVKFLIKKKANLNVLDRYGRTALILAVCCGSASIVNLLLEQNVDVSSQDLSGQTAREYAVSSHHHVICELLSDYKEKQMLKISSENSNPEQDLKLTSEEESQRLKVSENSQPEKMSQEPEINKDCDREVEEEIKKHGSNPVGLPENLTNGASAGNGDDGLIPQRRSRKPENQQFPDTENEEYHSDEQNDTRKQLSEEQNTGISQDEILTNKQKQIEVAEQKMNSELSLSHKKEEDLLRENSVLQEEIAMLRLELDETKHQNQLRENKILEEIESVKEKTDKLLRAMQLNEEALTKTNI

SEQ ID NO: 772 - protein, 509 aa, synthetic construct; identical to SEQ ID NO: 367
  REGION 1..509: note = PRAME__Homo_sapiens__A0A024R1E6

SEQ ID NO: 773 - protein, 509 aa, synthetic construct; identical to SEQ ID NO: 367
  REGION 1..509: note = PRAME__Homo_sapiens__P78395

SEQ ID NO: 774 - protein, 214 aa, synthetic construct
  REGION 1..214: note = PRDX5/m__Homo_sapiens__P30044
MGLAGVCALRRSAGYILVGGAGGQSAAAAARRYSEGEWASGGVRSFSRAAAAMAPIKVGDAIPAVEVFEGEPGNKVNLAELFKGKKGVLFGVPGAFTPGCSKTHLPGFVEQAEALKAKGVQVVACLSVNDAFVTGEWGRAHKAEGKVRLLADPTGAFGKETDLLLDDSLVSIFGNRRLKRFSMVVQDGIVKALNVEPDGTGLTCSLAPNIISQL

SEQ ID NO: 775 - protein, 102 aa, synthetic construct
  REGION 1..102: note = PRM2__Homo_sapiens__P04554
MVRYRVRSLSERSHEVYRQQLHGQEQGHHGQEEQGLSPEHVEVYERTHGQSHYRRRHCSRRRLHRIHRRQHRSCRRRKRRSCRHRRRHRRGCRTRKRTCRRH

SEQ ID NO: 776 - protein, 553 aa, synthetic construct
  REGION 1..553: note = prostein__Homo_sapiens__Q96JT2
MVQRLWVSRLLRHRKAQLLLVNLLTFGLEVCLAAGITYVPPLLLEVGVEEKFMTMVLGIGPVLGLVCVPLLGSASDHWRGRYGRRRPFIWALSLGILLSLFLIPRAGWLAGLLCPDPRPLELALLILGVGLLDFCGQVCFTPLEALLSDLFRDPDHCRQAYSVYAFMISLGGCLGYLLPAIDWDTSALAPYLGTQEECLFGLLTLIFLTCVAATLLVAEEAALGPTEPAEGLSAPSLSPHCCPCRARLAFRNLGALLPRLHQLCCRMPRTLRRLFVAELCSWMALMTFTLFYTDFVGEGLYQGVPRAEPGTEARRHYDEGVRMGSLGLFLQCAISLVFSLVMDRLVQRFGTRAVYLASVAAFPVAAGATCLSHSVAVVTASAALTGFTFSALQILPYTLASLYHREKQVFLPKYRGDTGGASSEDSLMTSFLPGPKPGAPFPNGHVGAGGSGLLPPPPALCGASACDVSVRVVVGEPTEARVVPGRGICLDLAILDSAFLLSQVAPSLFMGSIVQLSQSVTAYMVSAAGLGLVAIYFATQVVFDKSDLAKYSA

SEQ ID NO: 777 - protein, 215 aa, synthetic construct [sequence omitted]

SEQ ID NO: 778 - protein, 256 aa, synthetic construct
  REGION 1..256: note = proteinase-3__Homo_sapiens__P24158
MAHRPPSPALASVLLALLLSGAARAAEIVGGHEAQPHSRPYMASLQMRGNPGSHFCGGTLIHPSFVLTAAHCLRDIPQRLVNVVLGAHNVRTQEPTQQHFSVAQVFLNNYDAENKLNDVLLIQLSSPANLSASVATVQLPQQDQPVPHGTQCLAMGWGRVGAHDPPAQVLQELNVTVVTFFCRPHNICTFVPRRKAGICFGDSGGPLICDGIIQGIDSFVIWGCATRLFPDFFTRVALYVDWIRSTLRRVEAKGRP

SEQ ID NO: 779 - protein, 919 aa, synthetic construct
  REGION 1..919: note = PSA__Homo_sapiens__P55786
MWLAAAAPSLARRLLFLGPPPPPLLLLVFSRSSRRRLHSLGLAAMPEKRPFERLPADVSPINYSLCLKPDLLDFTFEGKLEAAAQVRQATNQIVMNCADIDIITASYAPEGDEEIHATGFNYQNEDEKVTLSFPSTLQTGTGTLKIDFVGELNDKMKGFYRSKYTTPSGEVRYAAVTQFEATDARRAFPCWDEPAIKATFDISLVVPKDRVALSNMNVIDRKPYPDDENLVEVKFARTPVMSTYLVAFVVGEYDFVETRSKDGVCVRVYTPVGKAEQGKFALEVAAKTLPFYKDYFNVPYPLPKIDLIAIADFAAGAMENWGLVTYRETALLIDPKNSCSSSRQWVALVVGHELAHQWFGNLVTMEWWTHLWLNEGFASWIEYLCVDHCFPEYDIWTQFVSADYTRAQELDALDNSHPIEVSVGHPSEVDEIFDAISYSKGASVIRMLHDYIGDKDFKKGMNMYLTKFQQKNAATEDLWESLENASGKPIAAVMNTWTKQMGFPLIYVEAEQVEDDRLLRLSQKKFCAGGSYVGEDCPQWMVPITISTSEDPNQAKLKILMDKPEMNVVLKNVKPDQWVKLNLGTVGFYRTQYSSAMLESLLPGIRDLSLPPVDRLGLQNDLFSLARAGIISTVEVLKVMEAFVNEPNYTVWSDLSCNLGILSTLLSHTDFYEEIQEFVKDVFSPIGERLGWDPKPGEGHLDALLRGLVLGKLGKAGHKATLEEARRRFKDHVEGKQILSADLRSPVYLTVLKHGDGTTLDIMLKLHKQADMQEEKNRIERVLGATLLPDLIQKVLTFALSEEVRPQDTVSVIGGVAGGSKHGRKAAWKFIKDNWEELYNRYQGGFLISRLIKLSVEGFAVDKMAGEVKAFFESHPAPSAERTIQQCCENILLNAAWLKRDAESIHQYLLQRKASPPTV

SEQ ID NO: 780 - protein, 219 aa, synthetic construct
  REGION 1..219: note = PSB9__Homo_sapiens__P28065
MLRAGAPTGDLPRAGEVHTGTTIMAVEFDGGVVMGSDSRVSAGEAVVNRVFDKLSPLHERIYCALSGSAADAQAVADMAAYQLELHGIELEEPPLVLAAANVVRNISYKYREDLSAHLMVAGWDQREGGQVYGTLGGMLTRQPFAIGGSGSTFIYGYVDAAYKPGMSPEECRRFTTDAIALAMSRDGSSGGVIYLVTITAAGVDHRVILGNELPKFYDE

SEQ ID NO: 781 - protein, 114 aa, synthetic construct
  REGION 1..114: note = PSCA__Homo_sapiens__D3DWI6
MAGLALQPGTALLCYSCKAQVSNEDCLQVENCTQLGEQCWTARIRAVGLLTVISKGCSLNCVDDSQDYYVGKKNITCCDTDLCNASGAHALQPAAAILALLPALGLLLWGPGQL

SEQ ID NO: 782 - protein, 123 aa, synthetic construct
  REGION 1..123: note = PSCA__Homo_sapiens__O43653
MKAVLLALLMAGLALQPGTALLCYSCKAQVSNEDCLQVENCTQLGEQCWTARIRAVGLLTVISKGCSLNCVDDSQDYYVGKKNITCCDTDLCNASGAHALQPAAAILALLPALGLLLWGPGQL

SEQ ID NO: 783 - protein, 320 aa, synthetic construct
  REGION 1..320: note = PSGR__Homo_sapiens__Q9H255
MSSCNFTHATFVLIGIPGLEKAHFWVGFPLLSMYVVAMFGNCIVVFIVRTERSLHAPMYLFLCMLAAIDLALSTSTMPKILALFWFDSREISFEACLTQMFFIHALSAIESTILLAMAFDRYVAICHPLRHAAVLNNTVTAQIGIVAVVRGSLFFFPLPLLIKRLAFCHSNVLSHSYCVHQDVMKLAYADTLPNVVYGLTAILLVMGVDVMFISLSYFLIIRTVLQLPSKSERAKAFGTCVSHIGVVLAFYVPLIGLSVVHRFGNSLHPIVRVVMGDIYLLLPPVINPIIYGAKTKQIRTRVLAMFKISCDKDLQAVGGK

SEQ ID NO: 784 - protein, 750 aa, synthetic construct
  REGION 1..750: note = PSM__Homo_sapiens__Q04609
MWNLLHETDSAVATARRPRWLCAGALVLAGGFFLLGFLFGWFIKSSNEATNITPKHNMKAFLDELKAENIKKFLYNFTQIPHLAGTEQNFQLAKQIQSQWKEFGLDSVELAHYDVLLSYPNKTHPNYISIINEDGNEIFNTSLFEPPPPGYENVSDIVPPFSAFSPQGMPEGDLVYVNYARTEDFFKLERDMKINCSGKIVIARYGKVFRGNKVKNAQLAGAKGVILYSDPADYFAPGVKSYPDGWNLPGGGVQRGNILNLNGAGDPLTPGYPANEYAYRRGIAEAVGLPSIPVHPIGYYDAQKLLEKMGGSAPPDSSWRGSLKVPYNVGPGFTGNFSTQKVKMHIHSTNEVTRIYNVIGTLRGAVEPDRYVILGGHRDSWVFGGIDPQSGAAVVHEIVRSFGTLKKEGWRPRRTILFASWDAEEFGLLGSTEWAEENSRLLQERGVAYINADSSIEGNYTLRVDCTPLMYSLVHNLTKELKSPDEGFEGKSLYESWTKKSPSPEFSGMPRISKLGSGNDFEVFFQRLGIASGRARYTKNWETNKFSGYPLYHSVYETYELVEKFYDPMFKYHLTVAQVRGGMVFELANSIVLPFDCRDYAVVLRKYADKIYSISMKHPQEMKTYSVSFDSLFSAVKNFTEIASKFSERLQDFDKSNPIVLRMMNDQLMFLERAFIDPLGLPDRPFYRHVIYAPSSHNKYAGESFPGIYDALFDIESKVDPSKAWGEVKRQIYVAAFTVQAAAETLSEVA

SEQ ID NO: 785 - protein, 1306 aa, synthetic construct
  REGION 1..1306: note = PTPRC__Homo_sapiens__NP_002829
MTMYLWLKLLAFGFAFLDTEVFVTGQSPTPSPTGLTTAKMPSVPLSSDPLPTHTTAFSPASTFERENDFSETTTSLSPDNTSTQVSPDSLDNASAFNTTGVSSVQTPHLPTHADSQTPSAGTDTQTFSGSAANAKLNPTPGSNAISDVPGERSTASTFPTDPVSPLTTTLSLAHHSSAALPARTSNTTITANTSDAYLNASETTTLSPSGSAVISTTTIATTPSKPTCDEKYANITVDYLYNKETKLFTAKLNVNENVECGNNTCTNNEVHNLTECKNASVSISHNSCTAPDKTLILDVPPGVEKFQLHDCTQVEKADTTICLKWKNIETFTCDTQNITYRFQCGNMIFDNKEIKLENLEPEHEYKCDSEILYNNHKFTNASKIIKTDFGSPGEPQIIFCRSEAAHQGVITWNPPQRSFHNFTLCYIKETEKDCLNLDKNLIKYDLQNLKPYTKYVLSLHAYIIAKVQRNGSAAMCHFTTKSAPPSQVWNMTVSMTSDNSMHVKCRPPRDRNGPHERYHLEVEAGNTLVRNESHKNCDFRVKDLQYSTDYTFKAYFHNGDYPGEPFILHHSTSYNSKALIAFLAFLIIVTSIALLVVLYKIYDLHKKRSCNLDEQQELVERDDEKQLMNVEPIHADILLETYKRKIADEGRLFLAEFQSIPRVFSKFPIKEARKPFNQNKNRYVDILPYDYNRVELSEINGDAGSNYINASYIDGFKEPRKYIAAQGPRDETVDDFWRMIWEQKATVIVMVTRCEEGNRNKCAEYWPSMEEGTRAFGDVVVKINQHKRCPDYIIQKLNIVNKKEKATGREVTHIQFTSWPDHGVPEDPHLLLKLRRRVNAFSNFFSGPIVVHCSAGVGRTGTYIGIDAMLEGLEAENKVDVYGYVVKLRRQRCLMVQVEAQYILIHQALVEYNQFGETEVNLSELHPYLHNMKKRDPPSEPSPLEAEFQRLPSYRSWRTQHIGNQEENKSKNRNSNVIPYDYNRVPLKHELEMSKESEHDSDESSDDDSDSEEPSKYINASFIMSYWKPEVMIAAQGPLKETIGDFWQMIFQRKVKVIVMLTELKHGDQEICAQYWGEGKQTYGDIEVDLKDTDKSSTYTLRVFELRHSKRKDSRTVYQYQYTNWSVEQLPAEPKELISMIQVVKQKLPQKNSSEGNKHHKSTPLLIHCRDGSQQTGIFCALLNLLESAETEEVVDIFQVVKALRKARPGMVSTFEQYQFLYDVIASTYPAQNGQVKKNNHQEDKIEFDNEVDKVKQDANCVNPLGAPEKLPEAKEQAEGSEPTSGTEGPEHSVNGPASPALNQGS

SEQ ID NO: 786 - protein, 207 aa, synthetic construct
  REGION 1..207: note = RAB8A__Homo_sapiens__P61006
MAKTYDYLFKLLLIGDSGVGKTCVLFRFSEDAFNSTFISTIGIDFKIRTIELDGKRIKLQIWDTAGQERFRTITTAYYRGAMGIMLVYDITNEKSFDNIRNWIRNIEEHASADVEKMILGNKCDVNDKRQVSKERGEKLALDYGIKFMETSAKANINVENAFFTLARDIKAKMDKKLEGNSPQGSNQGVKITPDQQKRSSFFRCVLL

SEQ ID NO: 787 - protein, 419 aa, synthetic construct
  REGION 1..419: note = RAGE-1__Homo_sapiens__Q9UQ07
MKNYKAIGKIGEGTFSEVMKMQSLRDGNYYACKQMKQRFESIEQVNNLREIQALRRLNPHPNILMLHEVVFDRKSGSLALICELMDMNIYELIRGRRYPLSEKKIMHYMYQLCKSLDHIHRNGIFHRDVKPENILIKQDVLKLGDFGSCRSVYSKQPYTEYISTRWYRAPECLLTDGFYTYKMDLWSAGCVFYEIASLQPLFPGVNELDQISKIHDVIGTPAQKILTKFKQSRAMNFDFPFKKGSGIPLLTTNLSPQCLSLLHAMVAYDPDERIAAHQALQHPYFQEQRKTEKRALGSHRKAGFPEHPVAPEPLSNSCQISKEGRKQKQSLKQEEDRPKRRGPAYVMELPKLKLSGVVRLSSYSSPTLQSVLGSGTNGRVPVLRPLKCIPASKKTDPQKDLKPAPQQCRLPTIVRKGGR

SEQ ID NO: 788 - protein, 462 aa, synthetic construct
  REGION 1..462: note = RARA__Homo_sapiens__P10276
MASNSSSCPTPGGGHLNGYPVPPYAFFFPPMLGGLSPPGALTTLQHQLPVSGYSTPSPATIETQSSSSEEIVPSPPSPPPLPRIYKPCFVCQDKSSGYHYGVSACEGCKGFFRRSIQKNMVYTCHRDKNCIINKVTRNRCQYCRLQKCFEVGMSKESVRNDRNKKKKEVPKPECSESYTLTPEVGELIEKVRKAHQETFPALCQLGKYTTNNSSEQRVSLDIDLWDKFSELSTKCIIKTVEFAKQLPGFTTLTIADQITLLKAACLDILILRICTRYTPEQDTMTFSDGLTLNRTQMHNAGFGPLTDLVFAFANQLLPLEMDDAETGLLSAICLICGDRQDLEQPDRVDMLQEPLLEALKVYVRKRRPSRPHMFPKMLMKITDLRSISAKGAERVITLKMEIPGSMPPLIQEMLENSEGLDTLSGQPGGGGRDGGGLAPPPGSCSPSLSPSSNRSSPATHSP

SEQ ID NO: 789 - protein, 189 aa, synthetic construct
  REGION 1..189: note = RASH__Homo_sapiens__P01112
MTEYKLVVVGAGGVGKSALTIQLIQNHFVDEYDPTIEDSYRKQVVIDGETCLLDILDTAGQEEYSAMRDQYMRTGEGFLCVFAINNTKSFEDIHQYREQIKRVKDSDDVPMVLVGNKCDLAARTVESRQAQDLARSYGIPYIETSAKTRQGVEDAFYTLVREIRQHKLRKLNPPDESGPGCMSCKCVLS

SEQ ID NO: 790 - protein, 189 aa, synthetic construct [sequence omitted]

SEQ ID NO: 791 - protein, 189 aa, synthetic construct
  REGION 1..189: note = RASN__Homo_sapiens__P01111
MTEYKLVVVGAGGVGKSALTIQLIQNHFVDEYDPTIEDSYRKQVVIDGETCLLDILDTAGQEEYSAMRDQYMRTGEGFLCVFAINNSKSFADINLYREQIKRVKDSDDVPMVLVGNKCDLPTRTVDTKQAHELAKSYGIPFIETSAKTRQGVEDAFYTLVREIRQYRMKKLNSSDDGTQGCMGLPCVVM

SEQ ID NO: 792 - protein, 181 aa, synthetic construct
  REGION 1..181: note = RGS5__Homo_sapiens__O15539
MCKGLAALPHSCLERAKEIKIKLGILLQKPDSVGDLVIPYNEKPEKPAKTQKTSLDEALQWRDSLDKLLQNNYGLASFKSFLKSEFSEENLEFWIACEDYKKIKSPAKMAEKAKQIYEEFIQTEAPKEVNIDHFTKDITMKNLVEPSLSSFDMAQKRIHALMEKDSLPRFVRSEFYQELIK

SEQ ID NO: 793 - protein, 724 aa, synthetic construct
  REGION 1..724: note = RHAMM/CD168__Homo_sapiens__O75330
MSFPKAPLKRFNDPSGCAPSPGAYDVKTLEVLKGPVSFQKSQRFKQQKESKQNLNVDKDTTLPASARKVKSSESKESQKNDKDLKILEKEIRVLLQERGAQDRRIQDLETELEKMEARLNAALREKTSLSANNATLEKQLIELTRTNELLKSKFSENGNQKNLRILSLELMKLRNKRETKMRGMMAKQEGMEMKLQVTQRSLEESQGKIAQLEGKLVSIEKEKIDEKSETEKLLEYIEEISCASDQVEKYKLDIAQLEENLKEKNDEILSLKQSLEENIVILSKQVEDLNVKCQLLEKEKEDHVNRNREHNENLNAEMQNLKQKFILEQQEREKLQQKELQIDSLLQQEKELSSSLHQKLCSFQEEMVKEKNLFEEELKQTLDELDKLQQKEEQAERLVKQLEEEAKSRAEELKLLEEKLKGKEAELEKSSAAHTQATLLLQEKYDSMVQSLEDVTAQFESYKALTASEIEDLKLENSSLQEKAAKAGKNAEDVQHQILATESSNQEYVRMLLDLQTKSALKETEIKEITVSFLQKITDLQNQLKQQEEDFRKQLEDEEGRKAEKENTTAELTEEINKWRLLYEELYNKTKPFQLQLDAFEVEKQALLNEHGAAQEQLNKIRDSYAKLLGHQNLKQKIKHVVKLKDENSQLKSEVSKLRCQLAKKKQSETKLQEELNKVLGIKHFDPSKAFHHESKENFALKTPLKEGNTNCYRAPMECQESWK

SEQ ID NO: 794 - protein, 193 aa, synthetic construct
  REGION 1..193: note = RHOC__Homo_sapiens__P08134
MAAIRKKLVIVGDGACGKTCLLIVFSKDQFPEVYVPTVFENYIADIEVDGKQVELALWDTAGQEDYDRLRPLSYPDTDVILMCFSIDSPDSLENIPEKWTPEVKHFCPNVPIILVGNKKDLRQDEHTRRELAKMKQEPVRSEEGRDMANRISAFGYLECSAKTKEGVREVFEMATRAGLQVRKNKRRRGCPIL

SEQ ID NO: 795 - protein, 295 aa, synthetic construct [sequence omitted]

SEQ ID NO: 796 - protein, 866 aa, synthetic construct
  REGION 1..866: note = RU1__Homo_sapiens__Q9UHJ3
MNGEQQLDADAGSGMEEVELSWEDYLEETGSTAVPYGSFKHVDTRLQNGFAPGMKLEVAVRTDPETYWVATVITTCEQLLLLRYDGYGEDRRADFWCDIRKADLYPIGWCEQNKKTLEAPEGIRDKVSDWDEFLRQTLIGACSPPVPLLEGLRNGRNPLDLIAPGSRLECQAFQDSLSTWIVTVVENIGGRLKLRYEGLESSDNYEHWLYYLDPFLHHVGWAAQQGYELQPPSAIRHLKNEAEWQEILAKVKEEEEEPLPSYLFKDKQVIGIHTFSVNMKLEAVDPWSPFGISPATVVKVFDEKYFLVEMDDLRPENHARRSFVCHADSPGIFPVQWSLKNGLHISPPPGYPSQDFDWADYLKQCGAEAAPQRCFPPLISEHEFKENMKLEAVNPILPEEVCVATITAVRGSYLWLQLEGSKKPIPECIVSVESMDIFPLGWCETNGHPLSTPRRARVYKQRKIAVVQPEKQVPSSRTVHEGLRNQELNSTESVMINGKYCCPKIYFNHRCFSGPYLNKGRIAELPQCVGPGNCVLVLREVLTLLINAAYKPSRVLRELQLDKDSVWHGCGEVLKAKYKGKSYRATVEIVKTADRVTEFCRQTCIKLECCPNLFGPRMVLDKCSENCSVLTKTKYTHYYGKKKNKRIGRPPGGHSNLACALKKASKRRKRRKNVFVHKKKRSSASVDNTPAGSPQGSGGEDEDDPDEGDDDSLSEGSTSEQQDELQEESEMSEKKSCSSSPTQSEISTSLPPDRQRRKRELRTFSFSDDENKPPSPKEIRIEVAERLHLDSNPLKWSVADVVRFIRSTDCAPLARIFLDQEIDGQALLLLTLPTVQECMDLKLGPAIKLCHHIERIKFAFYEQFAN

SEQ ID NO: 797 - protein, 476 aa, synthetic construct
  REGION 1..476: note = RU2__Homo_sapiens__Q9UHG0
MSGSSARSSHLSQPVVKSVLVYRNGDPFYAGRRVVIHEKKVSSFEVFLKEVTGGVQAPFGAVRNIYTPRTGHRIRKLDQIQSGGNYVAGGQEAFKKLNYLDIGEIKKRPMEVVNTEVKPVIHSRINVSARFRKPLQEPCTIFLIANGDLINPASRLLIPRKTLNQWDHVLQMVTEKITLRSGAVHRLYTLEGKLVESGAELENGQFYVAVGRDKFKKLPYSELLFDKSTMRRPFGQKASSLPPIVGSRKSKGSGNDRHSKSTVGSSDNSSPQPLKRKGKKEDVNSEKLTKLKQNVKLKNSQETIPNSDEGIFKAGAERSETRGAAEVQEDEDTQVEVPVDQRPAEIVDEEEDGEKANKDAEQKEDFSGMNGDLEEEGGREATDAPEQVEEILDHSEQQARPARVNGGTDEENGEELQQVNNELQLVLDKERKSQGAGSGQDEADVDPQRPPRPEVKITSPEENENNQQNKDYAAVA

SEQ ID NO: 798 - protein, 453 aa, synthetic construct
  REGION 1..453: note = RUNX1__Homo_sapiens__Q01196
MRIPVDASTSRRFTPPSTALSPGKMSEALPLGAPDAGAALAGKLRSGDRSMVEVLADHPGELVRTDSPNFLCSVLPTHWRCNKTLPIAFKVVALGDVPDGTLVTVMAGNDENYSAELRNATAAMKNQVARFNDLRFVGRSGRGKSFTLTITVFTNPPQVATYHRAIKITVDGPREPRRHRQKLDDQTKPGSLSFSERLSELEQLRRTAMRVSPHHPAPTPNPRASLNHSTAFNPQPQSQMQDTRQIQPSPPWSYDQSYQYLGSIASPSVHPATPISPGRASGMTTLSAELSSRLSTAPDLTAFSDPRQFPALPSISDPRMHYPGAFTYSPTPVTSGIGIGMSAMGSATRYHTYLPPPYPGSSQAQGGPFQASSPSYHLYYGASAGSYQFSMVGGERSPPRILPPCTNASTGSALLNPSLPNQSDVVEAEGSHSNSPTNMAPSARLEEAVWRPY

SEQ ID NO: 799 - protein, 359 aa, synthetic construct [sequence omitted]

SEQ ID NO: 800 - protein, 904 aa, synthetic construct
  REGION 1..904: note = SAGE__Homo_sapiens__Q9NXZ1
MQASPLQTSQPTPPEELHAAAYVFTNDGQQMRSDEVNLVATGHQSKKKHSRKSKRHSSSKRRKSMSSWLDKQEDAAVTHSICEERINNGQPVADNVLSTAPPWPDATIAHNIREERMENGQSRTDKVLSTAPPQLVHMAAAGIPSMSTRDLHSTVTHNIREERMENGQPQPDNVLSTGPTGLINMAATPIPAMSARDLYATVTHNVCEQKMENVQPAPDNVLLTLRPRRINMTDTGISPMSTRDPYATITYNVPEEKMEKGQPQPDNILSTASTGLINVAGAGTPAISTNGLYSTVPHNVCEEKMENDQPQPNNVLSTVQPVIIYLTATGIPGMNTRDQYATITHNVCEERVVNNQPLPSNALSTVLPGLAYLATADMPAMSTRDQHATIIHNLREEKKDNSQPTPDNVLSAVTPELINLAGAGIPPMSTRDQYATVNHHVHEARMENGQRKQDNVLSNVLSGLINMAGASIPAMSSRDLYATITHSVREEKMESGKPQTDKVISNDAPQLGHMAAGGIPSMSTKDLYATVTQNVHEERMENNQPQPSYDLSTVLPGLTYLTVAGIPAMSTRDQYATVTHNVHEEKIKNGQAASDNVFSTVPPAFINMAATGVSSMSTRDQYAAVTHNIREEKINNSQPAPGNILSTAPPWLRHMAAAGISSTITRDLYVTATHSVHEEKMTNGQQAPDNSLSTVPPGCINLSGAGISCRSTRDLYATVIHDIQEEEMENDQTPPDGFLSNSDSPELINMTGHCMPPNALDSFSHDFTSLSKDELLYKPDSNEFAVGTKNYSVSAGDPPVTVMSLVETVPNTPQISPAMAKKINDDIKYQLMKEVRRFGQNYERIFILLEEVQGSMKVKRQFVEFTIKEAARFKKVVLIQQLEKALKEIDSHCHLRKVKHMRKR

SEQ ID NO: 801 - protein, 800 aa, synthetic construct
  REGION 1..800: note = SART-_1__Homo_sapiens__O43290
MGSSKKHRGEKEAAGTTAAAGTGGATEQPPRHREHKKHKHRSGGSGGSGGERRKRSRERGGERGSGRRGAEAEARSSTHGRERSQAEPSERRVKREKRDDGYEAAASSKTSSGDASSLSIEETNKLRAKLGLKPLEVNAIKKEAGTKEEPVTADVINPMALRQREELREKLAAAKEKRLLNQKLGKIKTLGEDDPWLDDTAAWIERSRQLQKEKDLAEKRAKLLEEMDQEFGVSTLVEEEFGQRRQDLYSARDLQGLTVEHAIDSFREGETMILTLKDKGVLQEEEDVLVNVNLVDKERAEKNVELRKKKPDYLPYAEDESVDDLAQQKPRSILSKYDEELEGERPHSFRLEQGGTADGLRERELEEIRAKLRLQAQSLSTVGPRLASEYLTPEEMVTFKKTKRRVKKIRKKEKEVVVRADDLLPLGDQTQDGDFGSRLRGRGRRRVSEVEEEKEPVPQPLPSDDTRVENMDISDEEEGGAPPPGSPQVLEEDEAELELQKQLEKGRRLRQLQQLQQLRDSGEKVVEIVKKLESRQRGWEEDEDPERKGAIVFNATSEFCRTLGEIPTYGLAGNREEQEELMDFERDEERSANGGSESDGEENIGWSTVNLDEEKQQQDFSASSTTILDEEPIVNRGLAAALLLCQNKGLLETTVQKVARVKAPNKSLPSAVYCIEDKMAIDDKYSRREEYRGFTQDFKEKDGYKPDVKIEYVDETGRKLTPKEAFRQLSHRFHGKGSGKMKTERRMKKLDEEALLKKMSSSDTPLGTVALLQEKQKAQKTPYIVLSGSGKSMNANTITK

SEQ ID NO: 802 - protein, 958 aa, synthetic construct [sequence omitted]

SEQ ID NO: 803 - protein, 963 aa, synthetic construct
  REGION 1..963: note = SART-3__Homo_sapiens__Q15020
MATAAETSASEPEAESKAGPKADGEEDEVKAARTRRKVLSRAVAAATYKTMGPAWDQQEEGVSESDGDEYAMASSAESSPGEYEWEYDEEEEKNQLEIERLEEQLSINVYDYNCHVDLIRLLRLEGELTKVRMARQKMSEIFPLTEELWLEWLHDEISMAQDGLDREHVYDLFEKAVKDYICPNIWLEYGQYSVGGIGQKGGLEKVRSVFERALSSVGLHMTKGLALWEAYREFESAIVEAARLEKVHSLFRRQLAIPLYDMEATFAEYEEWSEDPIPESVIQNYNKALQQLEKYKPYEEALLQAEAPRLAEYQAYIDFEMKIGDPARIQLIFERALVENCLVPDLWIRYSQYLDRQLKVKDLVLSVHNRAIRNCPWTVALWSRYLLAMERHGVDHQVISVTFEKALNAGFIQATDYVEIWQAYLDYLRRRVDFKQDSSKELEELRAAFTRALEYLKQEVEERFNESGDPSCVIMQNWARIEARLCNNMQKARELWDSIMTRGNAKYANMWLEYYNLERAHGDTQHCRKALHRAVQCTSDYPEHVCEVLLTMERTEGSLEDWDIAVQKTETRLARVNEQRMKAAEKEAALVQQEEEKAEQRKRARAEKKALKKKKKIRGPEKRGADEDDEKEWGDDEEEQPSKRRRVENSIPAAGETQNVEVAAGPAGKCAAVDVEPPSKQKEKAASLKRDMPKVLHDSSKDSITVFVSNLPYSMQEPDTKLRPLFEACGEVVQIRPIFSNRGDFRGYCYVEFKEEKSALQALEMDRKSVEGRPMFVSPCVDKSKNPDFKVFRYSTSLEKHKLFISGLPFSCTKEELEEICKAHGTVKDLRLVTNRAGKPKGLAYVEYENESQASQAVMKMDGMTIKENIIKVAISNPPQRKVPEKPETRKAPGGPMLLPQTYGARGKGRTQLSLLPRALQRPSAAAPQAENGPAAAPAVAAPAATEAPKMSNADFAKLFLRK

SEQ ID NO: 804 - protein, 760 aa, synthetic construct
  REGION 1..760: note = SEPR__Homo_sapiens__Q12884
MKTWVKIVFGVATSAVLALLVMCIVLRPSRVHNSEENTMRALTLKDILNGTFSYKTFFPNWISGQEYLHQSADNNIVLYNIETGQSYTILSNRTMKSVNASNYGLSPDRQFVYLESDYSKLWRYSYTATYYIYDLSNGEFVRGNELPRPIQYLCWSPVGSKLAYVYQNNIYLKQRPGDPPFQITFNGRENKIFNGIPDWVYEEEMLATKYALWWSPNGKFLAYAEFNDTDIPVIAYSYYGDEQYPRTINIPYPKAGAKNPVVRIFIIDTTYPAYVGPQEVPVPAMIASSDYYFSWLTWVTDERVCLQWLKRVQNVSVLSICDFREDWQTWDCPKTQEHIEESRTGWAGGFFVSTPVFSYDAISYYKIFSDKDGYKHIHYIKDTVENAIQITSGKWEAINIFRVTQDSLFYSSNEFEEYPGRRNIYRISIGSYPPSKKCVTCHLRKERCQYYTASFSDYAKYYALVCYGPGIPISTLHDGRTDQEIKILEENKELENALKNIQLPKEEIKKLEVDEITLWYKMILPPQFDRSKKYPLLIQVYGGPCSQSVRSVFAVNWISYLASKEGMVIALVDGRGTAFQGDKLLYAVYRKLGVYEVEDQITAVRKFIEMGFIDEKRIAIWGWSYGGYVSSLALASGTGLFKCGIAVAPVSSWEYYASVYTERFMGLPTKDDNLEHYKNSTVMARAEYFRNVDYLLIHGTADDNVHFQNSAQIAKALVNAQVDFQAMWYSDQNHGLSGLSTNHLYTHMTHFLKQCFSLSD

SEQ ID NO: 805 - protein, 333 aa, synthetic construct
  REGION 1..333: note = SIA7F__Homo_sapiens__Q969X2
MACSRPPSQCEPTSLPPGPPAGRRHLPLSRRRREMSSNKEQRSAVFVILFALITILILYSSNSANEVFHYGSLRGRSRRPVNLKKWSITDGYVPILGNKTLPSRCHQCVIVSSSSHLLGTKLGPEIERAECTIRMNDAPTTGYSADVGNKTTYRVVAHSSVFRVLRRPQEFVNRTPETVFIFWGPPSKMQKPQGSLVRVIQRAGLVFPNMEAYAVSPGRMRQFDDLFRGETGKDREKSHSWLSTGWFTMVIAVELCDHVHVYGMVPPNYCSQRPRLQRMPYHYYEPKGPDECVTYIQNEHSRKGNHHRFITEKRVFSSWAQLYGITFSHPSWT

SEQ ID NO: 806 - protein, 356 aa, synthetic construct
  REGION 1..356: note = SIA8A__Homo_sapiens__Q92185
MSPCGRARRQTSRGAMAVLAWKFPRTRLPMGASALCVVVLCWLYIFPVYRLPNEKEIVQGVLQQGTAWRRNQTAARAFRKQMEDCCDPAHLFAMTKMNSPMGKSMWYDGEFLYSFTIDNSTYSLFPQATPFQLPLKKCAVVGNGGILKKSGCGRQIDEANFVMRCNLPPLSSEYTKDVGSKSQLVTANPSIIRQRFQNLLWSRKTFVDNMKIYNHSYIYMPAFSMKTGTEPSLRVYYTLSDVGANQTVLFANPNFLRSIGKFWKSRGIHAKRLSTGLFLVSAALGLCEEVAIYGFWPFSVNMHEQPISHHYYDNVLPFSGFHAMPEEFLQLWYLHKIGALRMQLDPCEDTSLQPTS

SEQ ID NO: 807 - protein, 418 aa, synthetic construct
  REGION 1..418: note = SIAT9__Homo_sapiens__Q9UNP4
MRTKAAGCAERRPLQPRTEAAAAPAGRAMPSEYTYVKLRSDCSRPSLQWYTRAQSKMRRPSLLLKDILKCTLLVFGVWILYILKLNYTTEECDMKKMHYVDPDHVKRAQKYAQQVLQKECRPKFAKTSMALLFEHRYSVDLLPFVQKAPKDSEAESKYDPPFGFRKFSSKVQTLLELLPEHDLPEHLKAKTCRRCVVIGSGGILHGLELGHTLNQFDVVIRLNSAPVEGYSEHVGNKTTIRMTYPEGAPLSDLEYYSNDLFVAVLFKSVDFNWLQAMVKKETLPFWVRLFFWKQVAEKIPLQPKHFRILNPVIIKETAFDILQYSEPQSRFWGRDKNVPTIGVIAVVLATHLCDEVSLAGFGYDLNQPRTPLHYFDSQCMAAMNFQTMHNVTTETKFLLKLVKEGVVKDLSGGIDREF

SEQ ID NO: 808 - protein, 352 aa, synthetic construct
  REGION 1..352: note = SIRT2/m__Homo_sapiens__A0A024R0G8
MDFLRNLFSQTLSLGSQKERLLDELTLEGVARYMQSERCRRVICLVGAGISTSAGIPDFRSPSTGLYDNLEKYHLPYPEAIFEISYFKKHPEPFFALAKELYPGQFKPTICHYFMRLLKDKGLLLRCYTQNIDTLERIAGLEQEDLVEAHGTFYTSHCVSASCRHEYPLSWMKEKIFSEVTPKCEDCQSLVKPDIVFFGESLPARFFSCMQSDFLKVDLLLVMGTSLQVQPFASLISKAPLSTPRLLINKEKAGQSDPFLGMIMGLGGGMDFDSKKAYRDVAWLGECDQGCLALAELLGWKKELEDLVRREHASIDAQSGAGVPNPSTSASPKKSPPPAKDEARTTEREKPQ

SEQ ID NO: 809 - protein, 389 aa, synthetic construct
  REGION 1..389: note = SIRT2/m__Homo_sapiens__Q8IXJ6
MAEPDPSHPLETQAGKVQEAQDSDSDSEGGAAGGEADMDFLRNLFSQTLSLGSQKERLLDELTLEGVARYMQSERCRRVICLVGAGISTSAGIPDFRSPSTGLYDNLEKYHLPYPEAIFEISYFKKHPEPFFALAKELYPGQFKPTICHYFMRLLKDKGLLLRCYTQNIDTLERIAGLEQEDLVEAHGTFYTSHCVSASCRHEYPLSWMKEKIFSEVTPKCEDCQSLVKPDIVFFGESLPARFFSCMQSDFLKVDLLLVMGTSLQVQPFASLISKAPLSTPRLLINKEKAGQSDPFLGMIMGLGGGMDFDSKKAYRDVAWLGECDQGCLALAELLGWKKELEDLVRREHASIDAQSGAGVPNPSTSASPKKSPPPAKDEARTTEREKPQ

SEQ ID NO: 810 - protein, 466 aa, synthetic construct
  REGION 1..466: note = SOX10__Homo_sapiens__P56693
MAEEQDLSEVELSPVGSEEPRCLSPGSAPSLGPDGGGGGSGLRASPGPGELGKVKKEQQDGEADDDKFPVCIREAVSQVLSGYDWTLVPMPVRVNGASKSKPHVKRPMNAFMVWAQAARRKLADQYPHLHNAELSKTLGKLWRLLNESDKRPFIEEAERLRMQHKKDHPDYKYQPRRRKNGKAAQGEAECPGGEAEQGGTAAIQAHYKSAHLDHRHPGEGSPMSDGNPEHPSGQSHGPPTPPTTPKTELQSGKADPKRDGRSMGEGGKPHIDFGNVDIGEISHEVMSNMETFDVAELDQYLPPNGHPGHVSSYSAAGYGLGSALAVASGHSAWISKPPGVALPTVSPPGVDAKAQVKTETAGPQGPPHYTDQPSTSQIAYTSLSLPHYGSAFPSISRPQFDYSDHQPSGPYYGHSGQASGLYSAFSYMGPSQRPLYTAISDPSPSGPQSHSPTHWEQPVYTTLSRP

SEQ ID NO: 811 - protein, 151 aa, synthetic construct
  REGION 1..151: note = SP17__Homo_sapiens__Q15506
MSIPFSNTHYRIPQGFGNLLEGLTREILREQPDNIPAFAAAYFESLLEKREKTNFDPAEWGSKVEDRFYNNHAFEEQEPPEKSDPKQEESQISGKEEETSVTILDSSEEDKEKEEVAAVKIQAAFRGHIAREEAKKMKTNSLQNEEKEENK

SEQ ID NO: 812 - protein, 97 aa, synthetic construct
  REGION 1..97: note = SPNXA__Homo_sapiens__Q9NS26
MDKQSSAGGVKRSVPCDSNEANEMMPETPTGDSDPQPAPKKMKTSESSTILVVRYRRNFKRTSPEELLNDHARENRINPLQMEEEEFMEIMVEIPAK

SEQ ID NO: 813 - protein, 141 aa, synthetic construct
  REGION 1..141: note = SPXN3__Homo_sapiens__Q5MJ09
MEQPTSSTNGEKTKSPCESNNKKNDEMQEVPNRVLAPEQSLKKTKTSEYPIIFVYYLRKGKKINSNQLENEQSQENSINPIQKEEDEGVDLSEGSSNEDEDLGPCEGPSKEDKDLDSSEGSSQEDEDLGLSEGSSQDSGED

SEQ ID NO: 814 - protein, 188 aa, synthetic construct
  REGION 1..188: note = SSX-1__Homo_sapiens__Q16384
MNGDDTFAKRPRDDAKASEKRSKAFDDIATYFSKKEWKKMKYSEKISYVYMKRNYKAMTKLGFKVTLPPFMCNKQATDFQGNDFDNDHNRRIQVEHPQMTFGRLHRIIPKIMPKKPAEDENDSKGVSEASGPQNDGKQLHPPGKANISEKINKRSGPKRGKHAWTHRLRERKQLVIYEEISDPEEDDE

SEQ ID NO: 815 - protein, 188 aa, synthetic construct
  REGION 1..188: note = SSX-2__Homo_sapiens__Q16385
MNGDDAFARRPTVGAQIPEKIQKAFDDIAKYFSKEEWEKMKASEKIFYVYMKRKYEAMTKLGFKATLPPFMCNKRAEDFQGNDLDNDPNRGNQVERPQMTFGRLQGISPKIMPKKPAEEGNDSEEVPEASGPQNDGKELCPPGKPTTSEKIHERSGPKRGEHAWTHRLRERKQLVIYEEISDPEEDDE

SEQ ID NO: 816 - protein, 188 aa, synthetic construct
  REGION 1..188: note = SSX3__Homo_sapiens__Q99909
MNGDDTFARRPTVGAQIPEKIQKAFDDIAKYFSKEEWEKMKVSEKIVYVYMKRKYEAMTKLGFKAILPSFMRNKRVTDFQGNDFDNDPNRGNQVQRPQMTFGRLQGIFPKIMPKKPAEEGNVSKEVPEASGPQNDGKQLCPPGKPTTSEKINMISGPKRGEHAWTHRLRERKQLVIYEEISDPEEDDE

SEQ ID NO: 817 - protein, 188 aa, synthetic construct
  REGION 1..188: note = SSX-4__Homo_sapiens__O60224
MNGDDAFARRPRDDAQISEKLRKAFDDIAKYFSKKEWEKMKSSEKIVYVYMKLNYEVMTKLGFKVTLPPFMRSKRAADFHGNDFGNDRNHRNQVERPQMTFGSLQRIFPKIMPKKPAEEENGLKEVPEASGPQNDGKQLCPPGNPSTLEKINKTSGPKRGKHAWTHRLRERKQLVVYEEISDPEEDDE

SEQ ID NO: 818 - protein, 295 aa, synthetic construct
  REGION 1..295: note = ST1A1__Homo_sapiens__P50225
MELIQDTSRPPLEYVKGVPLIKYFAEALGPLQSFQARPDDLLISTYPKSGTTWVSQILDMIYQGGDLEKCHRAPIFMRVPFLEFKAPGIPSGMETLKDTPAPRLLKTHLPLALLPQTLLDQKVKVVYVARNAKDVAVSYYHFYHMAKVHPEPGTWDSFLEKFMVGEVSYGSWYQHVQEWWELSRTHPVLYLFYEDMKENPKREIQKILEFVGRSLPEETVDFVVQHTSFKEMKKNPMTNYTTVPQEFMDHSISPFMRKGMAGDWKTTFTVAQNERFDADYAEKMAGCSLSFRSEL

SEQ ID NO: 819 - protein, 1268 aa, synthetic construct
  REGION 1..1268: note = STAG2__Homo_sapiens__Q8N3U4-2
MIAAPEIPTDFNLLQESETHFSSDTDFEDIEGKNQKQGKGKTCKKGKKGPAEKGKGGNGGGKPPSGPNRMNGHHQQNGVENMMLFEVVKMGKSAMQSVVDDWIESYKHDRDIALLDLINFFIQCSGCKGVVTAEMFRHMQNSEIIRKMTEEFDEDSGDYPLTMAGPQWKKFKSSFCEFIGVLVRQCQYSIIYDEYMMDTVISLLTGLSDSQVRAFRHTSTLAAMKLMTALVNVALNLSINMDNTQRQYEAERNKMIGKRANERLELLLQKRKELQENQDEIENMMNAIFKGVFVHRYRDAIAEIRAICIEEIGIWMKMYSDAFLNDSYLKYVGWTMHDKQGEVRLKCLTALQGLYYNKELNSKLELFTSRFKDRIVSMTLDKEYDVAVQAIKLLTLVLQSSEEVLTAEDCENVYHLVYSAHRPVAVAAGEFLYKKLFSRRDPEEDGMMKRRGRQGPNANLVKTLVFFFLESELHEHAAYLVDSMWDCATELLKDWECMNSLLLEEPLSGEEALTDRQESALIEIMLCTIRQAAECHPPVGRGTGKRVLTAKEKKTQLDDRTKITELFAVALPQLLAKYSVDAEKVTNLLQLPQYFDLEIYTTGRLEKHLDALLRQIRNIVEKHTDTDVLEACSKTYHALCNEEFTIFNRVDISRSQLIDELADKFNRLLEDFLQEGEEPDEDDAYQVLSTLKRITAFHNAHDLSKWDLFACNYKLLKTGIENGDMPEQIVIHALQCTHYVILWQLAKITESSSTKEDLLRLKKQMRVFCQICQHYLTNVNTTVKEQAFTILCDILMIFSHQIMSGGRDMLEPLVYTPDSSLQSELLSFILDHVFIEQDDDNNSADGQQEDEASKIEALHKRRNLLAAFCKLIVYTVVEMNTAADIFKQYMKYYNDYGDIIKETMSKTRQIDKIQCAKTLILSLQQLFNEMIQENGYNFDRSSSTFSGIKELARRFALTFGLDQLKTREAIAMLHKDGIEFAFKEPNPQGESHPPLNLAFLDILSEFSSKLLRQDKRTVYVYLEKFMTFQMSLRREDVWLPLMSYRNSLLAGGDDDTMSVISGISSRGSTVRSKKSKPSTGKRKVVEGMQLSLTEESSSSDSMWLSREQTLHTPVMMQTPQLTSTIMREPKRLRPEDSFMSVYPMQTEHHQTPLDYNTQVTWMLAQRQQEEARQQQERAAMSYVKLRTNLQHAIRRGTSLMEDDEEPIVEDVMMSSEGRIEDLNEGMDFDTMDIDLPPSKNRRERTELKPDFFDPASIMDESVLGVSMF

SEQ ID NO: 820 - protein, 490 aa, synthetic construct
  REGION 1..490: note = STAMP-1__Homo_sapiens__Q8NFT2
MESISMMGSPKSLSETFLPNGINGIKDARKVTVGVIGSGDFAKSLTIRLIRCGYHVVIGSRNPKFASEFFPHVVDVTHHEDALTKTNIIFVAIHREHYTSLWDLRHLLVGKILIDVSNNMRINQYPESNAEYLASLFPDSLIVKGFNVVSAWALQLGPKDASRQVYICSNNIQARQQVIELARQLNFIPIDLGSLSSAREIENLPLRLFTLWRGPVVVAISLATFFFLYSFVRDVIHPYARNQQSDFYKIPIEIVNKTLPIVAITLLSLVYLAGLLAAAYQLYYGTKYRRFPPWLETWLQCRKQLGLLSFFFAMVHVAYSLCLPMRRSERYLFLNMAYQQVHANIENSWNEEEVWRIEMYISFGIMSLGLLSLLAVTSIPSVSNALNWREFSFIQSTLGYVALLISTFHVLIYGWKRAFEEEYYRFYTPPNFVLALVLPSIVILGKIILFLPCISRKLKRIKKGWEKSQFLEEGMGGTIPHVSPERVTVM

SEQ ID NO: 821 - protein, 258 aa, synthetic construct [sequence omitted]

SEQ ID NO: 822 - protein, 339 aa, synthetic construct
  REGION 1..339: note = STEAP-1__Homo_sapiens__Q9UHE8
MESRKDITNQEELWKMKPRRNLEEDDYLHKDTGETSMLKRPVLLHLHQTAHADEFDCPSELQHTQELFPQWHLPIKIAAIIASLTFLYTLLREVIHPLATSHQQYFYKIPILVINKVLPMVSITLLALVYLPGVIAAIVQLHNGTKYKKFPHWLDKWMLTRKQFGLLSFFFAVLHAIYSLSYPMRRSYRYKLLNWAYQQVQQNKEDAWIEHDVWRMEIYVSLGIVGLAILALLAVTSIPSVSDSLTWREFHYIQSKLGIVSLLLGTIHALIFAWNKWIDIKQFVWYTPPTFMIAVFLPIVVLIFKSILFLPCLRKKILKIRHGWEDVTKINKTEICSQL

SEQ ID NO: 823 - protein, 165 aa, synthetic construct
  REGION 1..165: note = Survivin-2B__Homo_sapiens__O15392-2
MGAPTLPPAWQPFLKDHRISTFKNWPFLEGCACTPERMAEAGFIHCPTENEPDLAQCFFCFKELEGWEPDDDPIGPGTVAYACNTSTLGGRGGRITREEHKKHSSGCAFLSVKKQFEELTLGEFLKLDRERAKNKIAKETNNKKKEFEETAEKVRRAIEQLAAMD

SEQ ID NO: 824 - protein, 142 aa, synthetic construct; identical to SEQ ID NO: 324
  REGION 1..142: note = survivin__Homo_sapiens__O15392

SEQ ID NO: 825 - protein, 976 aa, synthetic construct
  REGION 1..976: note = SYCP1__Homo_sapiens__A0A024R0I2
MEKQKPFALFVPPRSSSSQVSAVKPQTLGGDSTFFKSFNKCTEDDFEFPFAKTNLSKNGENIDSDPALQKVNFLPVLEQVGNSDCHYQEGLKDSDLENSEGLSRVYSKLYKEAEKIKKWKVSTEAELRQKESKLQENRKIIEAQRKAIQELQFGNEKVSLKLEEGIQENKDLIKENNATRHLCNLLKETCARSAEKTKKYEYEREETRQVYMDLNNNIEKMITAFEELRVQAENSRLEMHFKLKEDYEKIQHLEQEYKKEINDKEKQVSLLLIQITEKENKMKDLTFLLEESRDKVNQLEEKTKLQSENLKQSIEKQHHLTKELEDIKVSLQRSVSTQKALEEDLQIATKTICQLTEEKETQMEESNKARAAHSFVVTEFETTVCSLEELLRTEQQRLEKNEDQLKILTMELQKKSSELEEMTKLTNNKEVELEELKKVLGEKETLLYENKQFEKIAEELKGTEQELIGLLQAREKEVHDLEIQLTAITTSEQYYSKEVKDLKTELENEKLKNTELTSHCNKLSLENKELTQETSDMTLELKNQQEDINNNKKQEERMLKQIENLQETETQLRNELEYVREELKQKRDEVKCKLDKSEENCNNLRKQVENKNKYIEELQQENKALKKKGTAESKQLNVYEIKVNKLELELESAKQKFGEITDTYQKEIEDKKISEENLLEEVEKAKVIADEAVKLQKEIDKRCQHKIAEMVALMEKHKHQYDKIIEERDSELGLYKSKEQEQSSLRASLEIELSNLKAELLSVKKQLEIEREEKEKLKREAKENTATLKEKKDKKTQTFLLETPEIYWKLDSKAVPSQTVSRNFTSVDHGISKDKRDYLWTSAKNTLSTPLPKAYTVKTPTKPKLQQRENLNIPIEESKKKRKMAFEFDINSDSSETTDLLSMVSEEETLKTLYRNNNPPASHLCVKTPKKAPSSLTTPGSTLKFGAIRKMREDRWAVIAKMDRKKKLKEAEKLFV

SEQ ID NO: 826 - protein, 976 aa, synthetic construct [sequence omitted]

SEQ ID NO: 827 - protein, 976 aa, synthetic construct; identical to SEQ ID NO: 825
  REGION 1..976: note = SYCP1__Homo_sapiens__Q15431

SEQ ID NO: 828 - protein, 109 aa, synthetic construct [sequence omitted]

SEQ ID NO: 829 - protein, 488 aa, synthetic construct
  REGION 1..488: note = SYT-SSX-1__Homo_sapiens__A4PIV7
MSVAFAAPRQRGKGEITPAAIQKMLDDNNHLIQCIMDSQNKGKTSECSQYQQMLHTNLVYLATIADSNQNMQSLLPAPPTQNMPMGPGGMNQSGPPPPPRSHNMPSDGMVGGGPPAPHMQNQMNGQMPGPNHMPMQGPGPNQLNMTNSSMNMPSSSHGSMGGYNHSVPSSQSMPVQNQMTMSQGQPMGNYGPRPNMSMQPNQGPMMHQQPPSQQYNMPQGGGQHYQGQQPPMGMMGQVNQGNHMMGQRQIPPYRPPQQGPPQQYSGQEDYYGDQYSHGGQGPPEGMNQQYYPDGHNDYGYQQPSYPEQGYDRPYEDSSQHYYEGGNSQYGQQQDAYQGPPPQQGYPPQQQQYPGQQGYPGQQQGYGPSQGGPGPQYPNYPQGQGQQYGGYRPTQPGPPQPPQQRPYGYDQIMPKKPAEDENDSKGVSEASGPQNDGKQLHPPGKANISEKINKRSGPKRGKHAWTHRLRERKQLVIYEEISDPEEDDE

SEQ ID NO: 830 - protein, 457 aa, synthetic construct
  REGION 1..457: note = SYT-SSX-1__Homo_sapiens__A4PIV8
MSVAFAAPRQRGKGEITPAAIQKMLDDNNHLIQCIMDSQNKGKTSECSQYQQMLHTNLVYLATIADSNQNMQSLLPAPPTQNMPMGPGGMNQSGPPPPPRSHNMPSDGMVGGGPPAPHMQNQMNGQMPGPNHMPMQGPGPNQLNMTNSSMNMPSSSHGSMGGYNHSVPSSQSMPVQNQMTMSQGQPMGNYGPRPNMSMQPNQGPMMHQQPPSQQYNMPQGGGQHYQGQQPPMGMMGQVNQGNHMMGQRQIPPYRPPQQGPPQQYSGQEDYYGDQYSHGGQGPPEGMNQQYYPDGNSQYGQQQDAYQGPPPQQGYPPQQQQYPGQQGYPGQQQGYGPSQGGPGPQYPNYPQGQGQQYGGYRPTQPGPPQPPQQRPYGYDQIMPKKPAEDENDSKGVSEASGPQNDGKQLHPPGKANISEKINKRSGPKRGKHAWTHRLRERKQLVIYEEISDPEEDDE

SEQ ID NO: 831 - protein, 488 aa, synthetic construct
  REGION 1..488: note = SYT-SSX-2__Homo_sapiens__A4PIV9
MSVAFAAPRQRGKGEITPAAIQKMLDDNNHLIQCIMDSQNKGKTSECSQYQQMLHTNLVYLATIADSNQNMQSLLPAPPTQNMPMGPGGMNQSGPPPPPRSHNMPSDGMVGGGPPAPHMQNQMNGQMPGPNHMPMQGPGPNQLNMTNSSMNMPSSSHGSMGGYNHSVPSSQSMPVQNQMTMSQGQPMGNYGPRPNMSMQPNQGPMMHQQPPSQQYNMPQGGGQHYQGQQPPMGMMGQVNQGNHMMGQRQIPPYRPPQQGPPQQYSGQEDYYGDQYSHGGQGPPEGMNQQYYPDGHNDYGYQQPSYPEQGYDRPYEDSSQHYYEGGNSQYGQQQDAYQGPPPQQGYPPQQQQYPGQQGYPGQQQGYGPSQGGPGPQYPNYPQGQGQQYGGYRPTQPGPPQPPQQRPYGYDQIMPKKPAEEGNDSEEVPEASGPQNDGKELCPPGKPTTSEKIHERSGPKRGEHAWTHRLRERKQLVIYEEISDPEEDDE

SEQ ID NO: 832 - protein, 457 aa, synthetic construct
  REGION 1..457: note = SYT-SSX-2__Homo_sapiens__A4PIW0
MSVAFAAPRQRGKGEITPAAIQKMLDDNNHLIQCIMDSQNKGKTSECSQYQQMLHTNLVYLATIADSNQNMQSLLPAPPTQNMPMGPGGMNQSGPPPPPRSHNMPSDGMVGGGPPAPHMQNQMNGQMPGPNHMPMQGPGPNQLNMTNSSMNMPSSSHGSMGGYNHSVPSSQSMPVQNQMTMSQGQPMGNYGPRPNMSMQPNQGPMMHQQPPSQQYNMPQGGGQHYQGQQPPMGMMGQVNQGNHMMGQRQIPPYRPPQQGPPQQYSGQEDYYGDQYSHGGQGPPEGMNQQYYPDGNSQYGQQQDAYQGPPPQQGYPPQQQQYPGQQGYPGQQQGYGPSQGGPGPQYPNYPQGQGQQYGGYRPTQPGPPQPPQQRPYGYDQIMPKKPAEEGNDSEEVPEASGPQNDGKELCPPGKPTTSEKIHERSGPKRGEHAWTHRLRERKQLVIYEEISDPEEDDE

SEQ ID NO: 833 - protein, 111 aa, synthetic construct
  REGION 1..111: note = TARP__Homo_sapiens__Q0VGM3
MKTNDTYMKFSWLTVPEKSLDKEHRCIVRHENNKNGVDQEIIFPPIKTDVITMDPKDNCSKDANDTLLLQLTNTSAYYMYLLLLLKSVVYFAIITCCLLRRTAFCCNGEKS

SEQ ID NO: 834 - protein, 58 aa, synthetic construct
  REGION 1..58: note = TCRg__Homo_sapiens__A2JGV3
MQMFPPSPLFFFLQLLKQSSRRLEHTFVFLRNFSLMLLRYIGKKRRATRFWDPRRGTP

SEQ ID NO: 835 - protein, 376 aa, synthetic construct
  REGION 1..376: note = TF2AA__Homo_sapiens__P52655
MANSANTNTVPKLYRSVIEDVINDVRDIFLDDGVDEQVLMELKTLWENKLMQSRAVDGFHSEEQQLLLQVQQQHQPQQQQHHHHHHHQQAQPQQTVPQQAQTQQVLIPASQQATAPQVIVPDSKLIQHMNASNMSAAATAATLALPAGVTPVQQILTNSGQLLQVVRAANGAQYIFQPQQSVVLQQQVIPQMQPGGVQAPVIQQVLAPLPGGISPQTGVIIQPQQILFTGNKTQVIPTTVAAPTPAQAQITATGQQQPQAQPAQTQAPLVLQVDGTGDTSSEEDEDEEEDYDDDEEEDKEKDGAEDGQVEEEPLNSEDDVSDEEGQELFDTENVVVCQYDKIHRSKNKWKFHLKDGIMNLNGRDYIFSKAIGDAEW

SEQ ID NO: 836 - protein, 567 aa, synthetic construct
  REGION 1..567: note = TGFR2__Homo_sapiens__P37173
MGRGLLRGLWPLHIVLWTRIASTIPPHVQKSVNNDMIVTDNNGAVKFPQLCKFCDVRFSTCDNQKSCMSNCSITSICEKPQEVCVAVWRKNDENITLETVCHDPKLPYHDFILEDAASPKCIMKEKKKPGETFFMCSCSSDECNDNIIFSEEYNTSNPDLLLVIFQVTGISLLPPLGVAISVIIIFYCYRVNRQQKLSSTWETGKTRKLMEFSEHCAIILEDDRSDISSTCANNINHNTELLPIELDTLVGKGRFAEVYKAKLKQNTSEQFETVAVKIFPYEEYASWKTEKDIFSDINLKHENILQFLTAEERKTELGKQYWLITAFHAKGNLQEYLTRHVISWEDLRKLGSSLARGIAHLHSDHTPCGRPKMPIVHRDLKSSNILVKNDLTCCLCDFGLSLRLDPTLSVDDLANSGQVGTARYMAPEVLESRMNLENVESFKQTDVYSMALVLWEMTSRCNAVGEVKDYEPPFGSKVREHPCVESMKDNVLRDRGRPEIPSFWLNHQGIQMVCETLTECWDHDPEARLTAQCVAERFSELEHLDRLSGRSCSEEKIPEDGSLNTTK

SEQ ID NO: 837 - protein, 684 aa, synthetic construct [sequence omitted]

SEQ ID NO: 838 - protein, 1124 aa, synthetic construct
  REGION 1..1124: note = TIE2__Homo_sapiens__Q02763
MDSLASLVLCGVSLLLSGTVEGAMDLILINSLPLVSDAETSLTCIASGWRPHEPITIGRDFEALMNQHQDPLEVTQDVTREWAKKVVWKREKASKINGAYFCEGRVRGEAIRIRTMKMRQQASFLPATLTMTVDKGDNVNISFKKVLIKEEDAVIYKNGSFIHSVPRHEVPDILEVHLPHAQPQDAGVYSARYIGGNLFTSAFTRLIVRRCEAQKWGPECNHLCTACMNNGVCHEDTGECICPPGFMGRTCEKACELHTFGRTCKERCSGQEGCKSYVFCLPDPYGCSCATGWKGLQCNEACHPGFYGPDCKLRCSCNNGEMCDRFQGCLCSPGWQGLQCEREGIQRMTPKIVDLPDHIEVNSGKFNPICKASGWPLPTNEEMTLVKPDGTVLHPKDFNHTDHFSVAIFTIHRILPPDSGVWVCSVNTVAGMVEKPFNISVKVLPKPLNAPNVIDTGHNFAVINISSEPYFGDGPIKSKKLLYKPVNHYEAWQHIQVTNEIVTLNYLEPRTEYELCVQLVRRGEGGEGHPGPVRRFTTASIGLPPPRGLNLLPKSQTTLNLTWQPIFPSSEDDFYVEVERRSVQKSDQQNIKVPGNLTSVLLNNLHPREQYVVRARVNTKAQGEWSEDLTAWTLSDILPPQPENIKISNITHSSAVISWTILDGYSISSITIRYKVQGKNEDQHVDVKIKNATITQYQLKGLEPETAYQVDIFAENNIGSSNPAFSHELVTLPESQAPADLGGGKMLLIAILGSAGMTCLTVLLAFLIILQLKRANVQRRMAQAFQNVREEPAVQFNSGTLALNRKVKNNPDPTIYPVLDWNDIKFQDVIGEGNFGQVLKARIKKDGLRMDAAIKRMKEYASKDDHRDFAGELEVLCKLGHHPNIINLLGACEHRGYLYLAIEYAPHGNLLDFLRKSRVLETDPAFAIANSTASTLSSQQLLHFAADVARGMDYLSQKQFIHRDLAARNILVGENYVAKIADFGLSRGQEVYVKKTMGRLPVRWMAIESLNYSVYTTNSDVWSYGVLLWEIVSLGGTPYCGMTCAELYEKLPQGYRLEKPLNCDDEVYDLMRQCWREKPYERPSFAQILVSLNRMLEERKTYVNTTLYEKFTYAGIDCSAEEAA

SEQ ID NO: 839 - protein, 596 aa, synthetic construct
  REGION 1..596: note = TKTL1__Homo_sapiens__P51854
MADAEARAEFPEEARPDRGTLQVLQDMASRLRIHSIRATCSTSSGHPTSCSSSSEIMSVLFFYIMRYKQSDPENPDNDRFVLAKRLSFVDVATGWLGQGLGVACGMAYTGKYFDRASYRVFCLMSDGESSEGSVWEAMAFASYYSLDNLVAIFDVNRLGHSGALPAEHCINIYQRRCEAFGWNTYVVDGRDVEALCQVFWQASQVKHKPTAVVAKTFKGRGTPSIEDAESWHAKPMPRERADAIIKLIESQIQTSRNLDPQPPIEDSPEVNITDVRMTSPPDYRVGDKIATRKACGLALAKLGYANNRVVVLDGDTRYSTFSEIFNKEYPERFIECFMAEQNMVSVALGCASRGRTIAFASTFAAFLTRAFDHIRIGGLAESNINIIGSHCGVSVGDDGASQMALEDIAMFRTIPKCTIFYPTDAVSTEHAVALAANAKGMCFIRTTRPETMVIYTPQERFEIGQAKVLRHCVSDKVTVIGAGITVYEALAAADELSKQDIFIRVIDLFTIKPLDVATIVSSAKATEGRIITVEDHYPQGGIGEAVCAAVSMDPDIQVHSLAVSGVPQSGKSEELLDMYGISARHIIVAVKCMLLN

SEQ ID NO: 840 - protein, 286 aa, synthetic construct
  REGION 1..286: note = TPI/m__Homo_sapiens__P60174
MAEDGEEAEFHFAALYISGQWPRLRADTDLQRLGSSAMAPSRKFFVGGNWKMNGRKQSLGELIGTLNAAKVPADTEVVCAPPTAYIDFARQKLDPKIAVAAQNCYKVTNGAFTGEISPGMIKDCGATWVVLGHSERRHVFGESDELIGQKVAHALAEGLGVIACIGEKLDEREAGITEKVVFEQTKVIADNVKDWSKVVLAYEPVWAIGTGKTATPQQAQEVHEKLRGWLKSNVSDAVAQSTRIIYGGSVTGATCKELASQPDVDGFLVGGASLKPEFVDIINAKQ

SEQ ID NO: 841 - protein, 119 aa, synthetic construct
  REGION 1..119: note = TRGV11__Homo_sapiens__Q99601
MPLVVAVIFFSLWVFALGQLEQPEISISRPANKSAHISWKASIQGFSSKIIHWYWQKPNKGLEYLLHVFLTISAQDCSGGKTKKLEVSKNAHTSTSTLKIKFLEKEDEVVYHCACWIRH

SEQ ID NO: 842 - protein, 137 aa, synthetic construct
  REGION 1..137: note = TRGV9__Homo_sapiens__A4D1X2
MLSLLHTSTLAVLGALCVYGAGHLEQPQISSTKTLSKTARLECVVSGITISATSVYWYRERPGEVIQFLVSISYDGTVRKESGIPSGKFEVDRIPETSTSTLTIHNVEKQDIATYYCALWEVHSSRQFEPSHSINVY

SEQ ID NO: 843 - protein, 122 aa, synthetic construct
  REGION 1..122: note = TRGV9__Homo_sapiens__Q99603
MLSLLHTSTLAVLGALCVYGAGHLEQPQISSTKTLSKTARLECVVSGITISATSVYWYRERPGEVIQFLVSISYDGTVRKESGIPSGKFEVDRIPETSTSTLTIHNVEKQDIATYYCALWEV

SEQ ID NO: 844 - protein, 122 aa, synthetic construct
  REGION 1..122: note = TRGV9__Homo_sapiens__Q99604
MLSLLHTSTLAVLGALCVYGAGHLEQPQISSTKTLSKTARLECVVSGIKISATSVYWYRERPGEVIQFLVSISYDGTVRKESGIPSGKFEVDRIPETSTSTLTIHNVEKQDIATYYCALWEV

SEQ ID NO: 845 - protein, 793 aa, synthetic construct
  REGION 1..793: note = TRPC1__Homo_sapiens__P48995
MMAALYPSTDLSGASSSSLPSSPSSSSPNEVMALKDVREVKEENTLNEKLFLLACDKGDYYMVKKILEENSSGDLNINCVDVLGRNAVTITIENENLDILQLLLDYGCQSADALLVAIDSEVVGAVDILLNHRPKRSSRPTIVKLMERIQNPEYSTTMDVAPVILAAHRNNYEILTMLLKQDVSLPKPHAVGCECTLCSAKNKKDSLRHSRFRLDIYRCLASPALIMLTEEDPILRAFELSADLKELSLVEVEFRNDYEELARQCKMFAKDLLAQARNSRELEVILNHTSSDEPLDKRGLLEERMNLSRLKLAIKYNQKEFVSQSNCQQFLNTVWFGQMSGYRRKPTCKKIMTVLTVGIFWPVLSLCYLIAPKSQFGRIIHTPFMKFIIHGASYFTFLLLLNLYSLVYNEDKKNTMGPALERIDYLLILWIIGMIWSDIKRLWYEGLEDFLEESRNQLSFVMNSLYLATFALKVVAHNKFHDFADRKDWDAFHPTLVAEGLFAFANVLSYLRLFFMYTTSSILGPLQISMGQMLQDFGKFLGMFLLVLFSFTIGLTQLYDKGYTSKEQKDCVGIFCEQQSNDTFHSFIGTCFALFWYIFSLAHVAIFVTRFSYGEELQSFVGAVIVGTYNVVVVIVLTKLLVAMLHKSFQLIANHEDKEWKFARAKLWLSYFDDKCTLPPPFNIIPSPKTICYMISSLSKWICSHTSKGKVKRQNSLKEWRNLKQKRDENYQKVMCCLVHRYLTSMRQKMQSTDQATVENLNELRQDLSKFRNEIRDLLGFRTSKYAMFYPRN

SEQ ID NO: 846 - protein, 1104 aa, synthetic construct
  REGION 1..1104: note = TRP-p8__Homo_sapiens__Q7Z2W7
MSFRAARLSMRNRRNDTLDSTRTLYSSASRSTDLSYSESDLVNFIQANFKKRECVFFTKDSKATENVCKCGYAQSQHMEGTQINQSEKWNYKKHTKEFPTDAFGDIQFETLGKKGKYIRLSCDTDAEILYELLTQHWHLKTPNLVISVTGGAKNFALKPRMRKIFSRLIYIAQSKGAWILTGGTHYGLMKYIGEVVRDNTISRSSEENIVAIGIAAWGMVSNRDTLIRNCDAEGYFLAQYLMDDFTRDPLYILDNNHTHLLLVDNGCHGHPTVEAKLRNQLEKYISERTIQDSNYGGKIPIVCFAQGGGKETLKAINTSIKNKIPCVVVEGSGQIADVIASLVEVEDALTSSAVKEKLVRFLPRTVSRLPEEETESWIKWLKEILECSHLLTVIKMEEAGDEIVSNAISYALYKAFSTSEQDKDNWNGQLKLLLEWNQLDLANDEIFTNDRRWESADLQEVMFTALIKDRPKFVRLFLENGLNLRKFLTHDVLTELFSNHFSTLVYRNLQIAKNSYNDALLTFVWKLVANFRRGFRKEDRNGRDEMDIELHDVSPITRHPLQALFIWAILQNKKELSKVIWEQTRGCTLAALGASKLLKTLAKVKNDINAAGESEELANEYETRAVELFTECYSSDEDLAEQLLVYSCEAWGGSNCLELAVEATDQHFIAQPGVQNFLSKQWYGEISRDTKNWKIILCLFIIPLVGCGFVSFRKKPVDKHKKLLWYYVAFFTSPFVVFSWNVVFYIAFLLLFAYVLLMDFHSVPHPPELVLYSLVFVLFCDEVRQWYVNGVNYFTDLWNVMDTLGLFYFIAGIVFRLHSSNKSSLYSGRVIFCLDYIIFTLRLIHIFTVSRNLGPKIIMLQRMLIDVFFFLFLFAVWMVAFGVARQGILRQNEQRWRWIFRSVIYEPYLAMFGQVPSDVDGTTYDFAHCTFTGNESKPLCVELDEHNLPRFPEWITIPLVCIYMLSTNILLVNLLVAMFGYTVGTVQENNDQVWKFQRYFLVQEYCSRLNIPFPFIVFAYFYMVVKKCFKCCCKEKNMESSVCCFKNEDNETLAWEGVMKENYLVKINTKANDTSEEMRHRFRQLDTKLNDLKGLLKEIANKIK

SEQ ID NO: 847 - protein, 698 aa, synthetic construct
  REGION 1..698: note = TSG10__Homo_sapiens__Q9BZW7
MMRSRSKSPRRPSPTARGANCDVELLKTTTRDREELKCMLEKYERHLAEIQGNVKVLKSERDKIFLLYEQAQEEITRLRREMMKSCKSPKSTTAHAILRRVETERDVAFTDLRRMTTERDSLRERLKIAQETAFNEKAHLEQRIEELECTVHNLDDERMEQMSNMTLMKETISTVEKEMKSLARKAMDTESELGRQKAENNSLRLLYENTEKDLSDTQRHLAKKKYELQLTQEKIMCLDEKIDNFTRQNIAQREEISILGGTLNDLAKEKECLQACLDKKSENIASLGESLAMKEKTISGMKNIIAEMEQASRQCTEALIVCEQDVSRMRRQLDETNDELAQIARERDILAHDNDNLQEQFAKAKQENQALSKKLNDTHNELNDIKQKVQDTNLEVNKLKNILKSEESENRQMMEQLRKANEDAENWENKARQSEADNNTLKLELITAEAEGNRLKEKVDSLNREVEQHLNAERSYKSQISTLHKSVVKMEEELQKVQFEKVSALADLSSTRELCIKLDSSKELLNRQLVAKDQEIEMRENELDSAHSEIELLRSQMANERISMQNLEALLVANRDKEYQSQIALQEKESEIQLLKEHLCLAENKMAIQSRDVAQFRNVVTQLEADLDITKRQLGTERFERERAVQELRRQNYSSNAYHMSSTMKPNTKCHSPERAHHRSPDRGLDRSLEENLCYRDF

SEQ ID NO: 848 - protein, 308 aa, synthetic construct
  REGION 1..308: note = TSPY1__Homo_sapiens__Q01534
MRPEGSLTYRVPERLRQGFCGVGRAAQALVCASAKEGTAFRMEAVQEGAAGVESEQAALGEEAVLLLDDIMAEVEVVAEEEGLVERREEAQRAQQAVPGPGPMTPESAPEELLAVQVELEPVNAQARKAFSRQREKMERRRKPHLDRRGAVIQSVPGFWANVIANHPQMSALITDEDEDMLSYMVSLEVGEEKHPVHLCKIMLFFRSNPYFQNKVITKEYLVNITEYRASHSTPIEWYPDYEVEAYRRRHHNSSLNFFNWFSDHNFAGSNKIAEILCKDLWRNPLQYYKRMKPPEEGTETSGDSQLLS

SEQ ID NO: 849 - protein, 122 aa, synthetic construct
  REGION 1..122: note = TVC_(TRGV3)__Homo_sapiens__M13231.1
MRWALLVLLAFLSPASQKSSNLEGRTKSVTRQTGSSAEITCDLTVTNTFYIHWYLHQEGKAPQRLLYYDVSTARDVLESGLSPGKYYTHTPRRWSWILRLQNLIENDSGVYYCATWDRQKLL

SEQ ID NO: 850 - protein, 267 aa, synthetic construct
  REGION 1..267: note = TX101__Homo_sapiens__Q9BY14-2
MGARQIQTSSSQTSPEEAMGTPRIQHLLILLVLGASLLTSGLELYCQKGLSMTVEADPANMFNWTTEEVETCDKGALCQETILIIKAGTETAILATKGCIPEGEEAITIVQHSSPPGLIVTSYSNYCEDSFCNDKDSLSQFWEFSETTASTVSTTLHCPTCVALGTCFSAPSLPCPNGTTRCYQGKLEITGGGIESSVEVKGCTAMIGCRLMSGILAVGPMFVREACPHQLLTQPRKTENGATCLPIPVWGLQLLLPLLLPSFIHFS

SEQ ID NO: 851 - protein, 529 aa, synthetic construct [sequence omitted]

SEQ ID NO: 852 - protein, 529 aa, synthetic construct [sequence omitted]

SEQ ID NO: 853 - protein, 529 aa, synthetic construct [sequence omitted]

SEQ ID NO: 854 - protein, 529 aa, synthetic construct [sequence omitted]

SEQ ID NO: 855 - protein, 237 aa, synthetic construct [sequence omitted]

SEQ ID NO: 856 - protein, 529 aa, synthetic construct [sequence omitted]

SEQ ID NO: 857 - protein, 529 aa, synthetic construct [sequence omitted]

SEQ ID NO: 858 - protein, 529 aa, synthetic construct [sequence omitted]

SEQ ID NO: 859 - protein, 529 aa, synthetic construct [sequence omitted]

SEQ ID NO: 860 - protein, 537 aa, synthetic construct
  REGION 1..537: note = TYRP1__Homo_sapiens__P17643
MSAPKLLSLGCIFFPLLLFQQARAQFPRQCATVEALRSGMCCPDLSPVSGPGTDRCGSSSGRGRCEAVTADSRPHSPQYPHDGRDDREVWPLRFFNRTCHCNGNFSGHNCGTCRPGWRGAACDQRVLIVRRNLLDLSKEEKNHFVRALDMAKRTTHPLFVIATRRSEEILGPDGNTPQFENISIYNYFVWTHYYSVKKTFLGVGQESFGEVDFSHEGPAFLTWHRYHLLRLEKDMQEMLQEPSFSLPYWNFATGKNVCDICTDDLMGSRSNFDSTLISPNSVFSQWRVVCDSLEDYDTLGTLCNSTEDGPIRRNPAGNVARPMVQRLPEPQDVAQCLEVGLFDTPPFYSNSTNSFRNTVEGYSDPTGKYDPAVRSLHNLAHLFLNGTGGQTHLSPNDPIFVLLHTFTDAVFDEWLRRYNADISTFPLENAPIGHNRQYNMVPFWPPVTNTEMFVTAPDNLGYTYEIQWPSREFSVPEIIAIAVVGALLLVALIFGTASYLIRARRSMDEANQPLLTDQYQCYAEEYEKLQNPNQSVV

SEQ ID NO: 861 - protein, 519 aa, synthetic construct
  REGION 1..519: note = TYRP2__Homo_sapiens__P40126
MSPLWWGFLLSCLGCKILPGAQGQFPRVCMTVDSLVNKECCPRLGAESANVCGSQQGRGQCTEVRADTRPWSGPYILRNQDDRELWPRKFFHRTCKCTGNFAGYNCGDCKFGWTGPNCERKKPPVIRQNIHSLSPQEREQFLGALDLAKKRVHPDYVITTQHWLGLLGPNGTQPQFANCSVYDFFVWLHYYSVRDTLLGPGRPYRAIDFSHQGPAFVTWHRYHLLCLERDLQRLIGNESFALPYWNFATGRNECDVCTDQLFGAARPDDPTLISRNSRFSSWETVCDSLDDYNHLVTLCNGTYEGLLRRNQMGRNSMKLPTLKDIRDCLSLQKFDNPPFFQNSTFSFRNALEGFDKADGTLDSQVMSLHNLVHSFLNGTNALPHSAANDPIFVVLHSFTDAIFDEWMKRFNPPADAWPQELAPIGHNRMYNMVPFFPPVTNEELFLTSDQLGYSYAIDLPVSVEETPGWPTTLLVVMGTLVALVGLFVLLAFLQYRRLRKGYTPLMETHLSSKRYTEEA

SEQ ID NO: 862 - protein, 151 aa, synthetic construct
  REGION 1..151: note = UPA__Homo_sapiens__Q96NZ9
MRRLLLVTSLVVVLLWEAGAVPAPKVPIKMQVKHWPSEQDPEKAWGARVVEPPEKDDQLVVLFPVQKPKLLTTEEKPRGQGRGPILPGTKAWMETEDTLGHVLSPEPDHDSLYHPPPEEDQGEERPRLWVMPNHQVLLGPEEDQDHIYHPQ

SEQ ID NO: 863 - protein, 174 aa, synthetic construct [sequence omitted]

SEQ ID NO: 864 - protein, 249 aa, synthetic construct
  REGION 1..249: note = WT1__Homo_sapiens__A0A0H5AUY0
MGSDVRDLNALLPAVPSLGGGGGCALPVSGAAQWAPVLDFAPPGASAYGSLGGPAPPPAPPPPPPPPPHSFIKQEPSWGGAEPHEEQCLSAFTVHFSGQFTGTAGACRYGPFGPPPPSQASSGQARMFPNAPYLPSCLESQPAIRNQGYSTVTFDGTPSYGHTPSHHAAQFPNHSFKHEDPMGQQGSLGEQQYSVPPPVYGCHTPTDSCTGSQALLLRTPYSSDNLYQMTSQLECMTWNQMNLGATLKG

SEQ ID NO: 865 - protein, 449 aa, synthetic construct; identical to SEQ ID NO: 365
  REGION 1..449: note = WT1__Homo_sapiens__P19544

SEQ ID NO: 866 - protein, 92 aa, synthetic construct
  REGION 1..92: note = WT1__Homo_sapiens__Q06250
MQRRGQPLENHVALIHWQSAGIPASKVHNYCNMKKSRLGRSRAVRISQPLLSPRRCPLHLTERGAGLLQPQPQGPVRTPGPPSGSHPAAADN

SEQ ID NO: 867 - protein, 81 aa, synthetic construct
  REGION 1..81: note = XAGE1__Homo_sapiens__Q9HD64
MESPKKKNQQLKVGILHLGSRQKKIRIQLRSQCATWKVICKSCISQTPGINLDLGSGVKVKIIPKEEHCKMPEAGEEQPQV

SEQ ID NO: 868 - protein, 178 aa, synthetic construct
  REGION 1..178: note = IL-10__Homo_sapiens__P22301
MHSSALLCCLVLLTGVRASPGQGTQSENSCTHFPGNLPNMLRDLRDAFSRVKTFFQMKDQLDNLLLKESLLEDFKGYLGCQALSEMIQFYLEEVMPQAENQDPDIKAHVNSLGENLKTLRLRLRRCHRFLPCENKSKAVEQVKNAFNKLQEKGIYKAMSEFDIFINYIEAYMTMKIRN

SEQ ID NO: 869 - protein, 134 aa, synthetic construct
  REGION 1..134: note = IL-5__Homo_sapiens__P05113
MRMLLHLSLLALGAAYVYAIPTEIPTSALVKETLALLSTHRTLLIANETLRIPVPVHKNHQLCTEEIFQGIGTLESQTVQGGTVERLFKNLSLIKKYIDGQKKKCGEERRRVNQFLDYLQEFLGVMNTEWIIES

SEQ ID NO: 870 - protein, 554 aa, synthetic construct
  REGION 1..554: note = M-CSF__Homo_sapiens__P09603
MTAPGAAGRCPPTTWLGSLLLLVCLLASRSITEEVSEYCSHMIGSGHLQSLQRLIDSQMETSCQITFEFVDQEQLKDPVCYLKKAFLLVQDIMEDTMRFRDNTPNAIAIVQLQELSLRLKSCFTKDYEEHDKACVRTFYETPLQLLEKVKNVFNETKNLLDKDWNIFSKNCNNSFAECSSQDVVTKPDCNCLYPKAIPSSDPASVSPHQPLAPSMAPVAGLTWEDSEGTEGSSLLPGEQPLHTVDPGSAKQRPPRSTCQSFEPPETPVVKDSTIGGSPQPRPSVGAFNPGMEDILDSAMGTNWVPEEASGEASEIPVPQGTELSPSRPGGGSMQTEPARPSNFLSASSPLPASAKGQQPADVTGTALPRVGPVRPTGQDWNHTPQKTDHPSALLRDPPEPGSPRISSLRPQGLSNPSTLSAQPQLSRSHSSGSVLPLGELEGRRSTRDRRSPAEPEGGPASEGAARPLPRFNSVPLTDTGHERQSEGSFSPQLQESVFHLLVPSVILVLLAVGGLLFYRWRRRSHQEPQRADSPLEQPEGSPLTQDDRQVELPV

SEQ ID NO: 871 - protein, 390 aa, synthetic construct
  REGION 1..390: note = TGFbeta1__Homo_sapiens__P01137
MPPSGLRLLLLLLPLLWLLVLTPGRPAAGLSTCKTIDMELVKRKRIEAIRGQILSKLRLASPPSQGEVPPGPLPEAVLALYNSTRDRVAGESAEPEPEPEADYYAKEVTRVLMVETHNEIYDKFKQSTHSIYMFFNTSELREAVPEPVLLSRAELRLLRLKLKVEQHVELYQKYSNNSWRYLSNRLLAPSDSPEWLSFDVTGVVRQWLSRGGEIEGFRLSAHCSCDSRDNTLQVDINGFTTGRRGDLATIHGMNRPFLLLMATPLERAQHLQSSRHRRALDTNYCFSSTEKNCCVRQLYIDFRKDLGWKWIHEPKGYHANFCLGPCPYIWSLDTQYSKVLALYNQHNPGASAAPCCVPQALEPLPIVYYVGRKPKVEQLSNMIVRSCKCS

SEQ ID NO: 872 - protein, 479 aa, synthetic construct
  REGION 1..479: note = Caspase_8__Homo_sapiens__Q14790
MDFSRNLYDIGEQLDSEDLASLKFLSLDYIPQRKQEPIKDALMLFQRLQEKRMLEESNLSFLKELLFRINRLDLLITYLNTRKEEMERELQTPGRAQISAYRVMLYQISEEVSRSELRSFKFLLQEEISKCKLDDDMNLLDIFIEMEKRVILGEGKLDILKRVCAQINKSLLKIINDYEEFSKERSSSLEGSPDEFSNGEELCGVMTISDSPREQDSESQTLDKVYQMKSKPRGYCLIINNHNFAKAREKVPKLHSIRDRNGTHLDAGALTTTFEELHFEIKPHDDCTVEQIYEILKIYQLMDHSNMDCFICCILSHGDKGIIYGTDGQEAPIYELTSQFTGLKCPSLAGKPKVFFIQACQGDNYQKGIPVETDSEEQPYLEMDLSSPQTRYIPDEADFLLGMATVNNCVSYRNPAEGTWYIQSLCQSLRERCPRGDDILTILTEVNYEVSNKDDKKNMGKQMPQPTFTLRKKLVFPSD

SEQ ID NO: 873 - protein, 375 aa, synthetic construct
  REGION 1..375: note = SERPINB5__Homo_sapiens__P36952
MDALQLANSAFAVDLFKQLCEKEPLGNVLFSPICLSTSLSLAQVGAKGDTANEIGQVLHFENVKDVPFGFQTVTSDVNKLSSFYSLKLIKRLYVDKSLNLSTEFISSTKRPYAKELETVDFKDKLEETKGQINNSIKDLTDGHFENILADNSVNDQTKILVVNAAYFVGKWMKKFSESETKECPFRVNKTDTKPVQMMNMEATFCMGNIDSINCKIIELPFQNKHLSMFILLPKDVEDESTGLEKIEKQLNSESLSQWTNPSTMANAKVKLSIPKFKVEKMIDPKACLENLGLKHIFSEDTSDFSGMSETKGVALSNVIHKVCLEITEDGGDSIEVPGARILQHKDELNADHPFIYIIRHNKTRNIIFFGKFCSP

SEQ ID NO: 874 - protein, 212 aa, synthetic construct [sequence omitted]

SEQ ID NO: 875 - protein, 296 aa, synthetic construct
  REGION 1..296: note = calreticulin__Homo_sapiens__B4E2Y9
MHGDSEYNIMFGPDICGPGTKKVHVIFNYKGKNVLINKDIRCKDDEFTHLYTLIVRPDNTYEVKIDNSQVESGSLEDDWDFLPPKKIKDPDASKPEDWDERAKIDDPTDSKPEDWDKPEHIPDPDAKKPEDWDEEMDGEWEPPVIQNPEYKGEWKPRQIDNPDYKGTWIHPEIDNPEYSPDPSIYAYDNFGVLGLDLWQVKSGTIFDNFLITNDEAYAEEFGNETWGVTKAAEKQMKDKQDEEQRLKEEEEDKKRKEEEEAEDKEDDEDKDEDEEDEEDKEEDEEEDVPGQAKDEL

SEQ ID NO: 876 - protein, 417 aa, synthetic construct
  REGION 1..417: note = calreticulin__Homo_sapiens__P27797
MLLSVPLLLGLLGLAVAEPAVYFKEQFLDGDGWTSRWIESKHKSDFGKFVLSSGKFYGDEEKDKGLQTSQDARFYALSASFEPFSNKGQTLVVQFTVKHEQNIDCGGGYVKLFPNSLDQTDMHGDSEYNIMFGPDICGPGTKKVHVIFNYKGKNVLINKDIRCKDDEFTHLYTLIVRPDNTYEVKIDNSQVESGSLEDDWDFLPPKKIKDPDASKPEDWDERAKIDDPTDSKPEDWDKPEHIPDPDAKKPEDWDEEMDGEWEPPVIQNPEYKGEWKPRQIDNPDYKGTWIHPEIDNPEYSPDPSIYAYDNFGVLGLDLWQVKSGTIFDNFLITNDEAYAEEFGNETWGVTKAAEKQMKDKQDEEQRLKEEEEDKKRKEEEEAEDKEDDEDKDEDEEDEEDKEEDEEEDVPGQAKDEL

SEQ ID NO: 877 - protein, 384 aa, synthetic construct
  REGION 1..384: note = calreticulin__Homo_sapiens__Q96L12
MARALVQLWAICMLRVALATVYFQEEFLDGEHWRNRWLQSTNDSRFGHFRLSSGKFYGHKEKDKGLQTTQNGRFYAISARFKPFSNKGKTLVIQYTVKHEQKMDCGGGYIKVFPADIDQKNLNGKSQYYIMFGPDICGFDIKKVHVILHFKNKYHENKKLIRCKVDGFTHLYTLILRPDLSYDVKIDGQSIESGSIEYDWNLTSLKKETSPAESKDWEQTKDNKAQDWEKHFLDASTSKQSDWNGDLDGDWPAPMLQKPPYQDGLKPEGIHKDVWLHRKMKNTDYLTQYDLSEFENIGAIGLELWQVRSGTIFDNFLITDDEEYADNFGKATWGETKGPEREMDAIQAKEEMKKAREEEEEELLSGKINRHEHYFNQFHRRNEL

SEQ ID NO: 878 - protein, 464 aa, synthetic construct
  REGION 1..464: note = N-myc__Homo_sapiens__P04198
MPSCSTSTMPGMICKNPDLEFDSLQPCFYPDEDDFYFGGPDSTPPGEDIWKKFELLPTPPLSPSRGFAEHSSEPPSWVTEMLLENELWGSPAEEDAFGLGGLGGLTPNPVILQDCMWSGFSAREKLERAVSEKLQHGRGPPTAGSTAQSPGAGAASPAGRGHGGAAGAGRAGAALPAELAHPAAECVDPAVVFPFPVNKREPAPVPAAPASAPAAGPAVASGAGIAAPAGAPGVAPPRPGGRQTSGGDHKALSTSGEDTLSDSDDEDDEEEDEEEEIDVVTVEKRRSSSNTKAVTTFTITVRPKNAALGPGRAQSSELILKRCLPIHQQHNYAAPSPYVESEDAPPQKKIKSEASPRPLKSVIPPKAKSLSPRNSDSEDSERRRNHNILERQRRNDLRSSFLTLRDHVPELVKNEKAAKVVILKKATEYVHSLQAEEHQLLLEKEKLQARQQQLLKKIEHARTC

SEQ ID NO: 879 - protein, 712 aa, synthetic construct
  REGION 1..712: note = ILC-4 with Larget T Antigen S220A substitution
MAPRSARRPLLLLLLLLLLGLMHCASAAMFMVKNGNGTACIMANFSAAFSVNYDTKSGPKNMTLDLPSDATVVLNRSSCGKENTSDPSLVIAFGRGHTLTLNFTRNATRYSVQLMSFVYNLSDTHLFPNASSKEIKTVESITDIRADIDKKYRCVSGTQVHMNNVTVTLHDATIQAYLSNSSFSRGETRCEQDLEMDLVLNRKEREALCKLLEIAPNCYGNIPLMKAAFKRSCLKHHPDKGGNPVIMMELNTLWSKFQQNIHKLRSDFSMFDEVDEAPIYGTTKFKEWWRSGGFSFGKAYEYGPNPHGTNSRSRKPSSNASRGAPSGSSPPHSQSSSSGYGSFSASQASDSQSRGPDIPPEHHEEPTSSSGSSSREETTNSGRESSTPNGTSVPRNSSRTDGTWEDLFCDESLSAPEPPSSSEEPEEPPSSRSSPRQPPSSSAEEASSSQFTDEEYRSSSFTTPKTPPPFSRKRKFGGSRSSASSASSASFTSTPPKPKKNRETPVPTDFPIDLSDYLSHAVEFTCLLASMGLQLNLTYERKDNTTVTRLLNINPNKTSASGSCGAHLVTLELHSEGTTVLLFQFGMNASSSRFFLQGIQLNTILPDARDPAFKAANGSLRALQATVGNSYKCNAEEHVRVTKAFSVNIFKVWVQAFKVEGGQFGSVEECLLDENSMLIPIAVGGALAGLVLIVLIAYLVGRKRSHAGYQTI

SEQ ID NO: 880 - protein, 677 aa, synthetic construct
  REGION 1..677: note = ILC-4 with Larget T Antigen S220A substitution
MAPRSARRPLLLLLLLLLLGLMHCASAAMFMVKNGNGTACIMANFSAAFSVNYDTKSGPKNMTLDLPSDATVVLNRSSCGKENTSDPSLVIAFGRGHTLTLNFTRNATRYSVQLMSFVYNLSDTHLFPNASSKEIKTVESITDIRADIDKKYRCVSGTQVHMNNVTVTLHDATIQAYLSNSSFSRGETRCEQDLEMDLVLNRKEREALCKLLEIAPNCYGNIPLMKAAFKRSCLKHHPDKGGNPVIMMELNTLWSKFQQNIHKLRSDFSMFDEVDEAPIYGTTKFKEWWRSGGFSFGKAYEYGPNPHGTNSRSRKPSSNASRGAPSGSSPPHSQSSSSGYGSFSASQASDSQSRGPDIPPEHHEEPTSSSGSSSREETTNSGRESSTPNGTSVPRNSSRTDGTWEDLFCDESLSAPEPPSSSEEPEEPPSSRSSPRQPPSSSAEEASSSQFTDEEYRSSSFTTPKTPPPFSRKRKFGGSRSSASSASSASFTSTPPKPKKNRETPVPTDFPIDLSDYLSHAVEFTCLLASMGLQLNLTYERKDNTTVTRLLNINPNKTSASGSCGAHLVTLELHSEGTTVLLFQFGMNASSSRFFLQGIQLNTILPDARDPAFKAANGSLRALQATVGNSYKCNAEEHVRVTKAFSVNIFKVWVQAFKVEGGQFGSVEECLLDENSM

SEQ ID NO: 881 - DNA, 1359 bp, synthetic construct; identical to SEQ ID NO: 220
  misc_feature 1..1359: note = CD80 (Extracellular Domain +Fc Domain) DNA Sequence
  source 1..1359: mol_type = other DNA

SEQ ID NO: 882 - skipped
